(19) United States
(12) Patent Application Publication
(10) Pub. No.: US 2010/0292085 A1
(43) Pub. Date: Nov. 18, 2010

(54) Methods and compositions for characterization of HSD1 inhibitors

(76) Inventors: Pek Yee Lum, Seattle, WA (US); Rolf Thieringer, Highland Park, NJ (US); Serguei B. Stepaniants, Redmond, WA (US); Cheryl LeGrand, Langhome, PA (US); Sarah Dreikorn, Scotch Plains, NJ (US)

Correspondence Address: R. Douglas Bradley;Merck & Co., Inc., Patent Department RY60-30, P.O. Box 2000, Rahway, NJ, 07065-0907, US

(21) Appl. No.: 12/584,317

(22) Filed: Sep. 3, 2009

Related U.S. Application Data
(63) Continuation of application No. 11/595,699, filed on Nov. 9, 2006, now abandoned.
(60) Provisional application No. 60/736,040, filed on Nov. 10, 2005.

(51) Int. Cl. C40B 30/00; C12Q 1/68; G01N 33/574

(52) U.S. Cl. 506/7; 435/6; 435/7.23

(57) ABSTRACT

One aspect of the present invention relates to methods of identifying cortisone response signature gene sets and methods of using the identified gene sets to identify compounds that modulate HSD1 activity. In some embodiments, methods are provided to use cortisone response gene sets to estimate the HSD1 activity. Another aspect of the present inventive relates to methods for identification of off-target signature gene sets that can be used to estimate HSD1 compound induced off-target activity and methods for classification of compounds that modulate HSD1 activity. Another aspect of the present invention relates to cell lines that over-expresses HSD1 and methods of use thereof. Additional embodiments of the of the invention are described in the specification provided herein. The contents of this ABSTRACT are not intended to in anyway limit the scope of the invention claimed herein.

[0001] This application is a continuation of application Ser. No. 11/595,699, filed on Nov. 9, 2006, which claims benefit of U.S. Provisional Patent Application Ser. No. 60/736,040 filed on Nov. 10, 2005, both of which are incorporated by reference herein in their entirety.

[0002] This application includes a Sequence Listing submitted on compact disc, recorded on two compact discs, including one duplicate, containing Filename RS0225CA.txt, of size 1,433,600 bytes, created Aug. 19, 2009. The Sequence Listing on the compact discs is incorporated by reference herein in its entirety.

### BACKGROUND OF THE INVENTION

[0003] The references cited herein are not admitted to be prior art to the claimed invention.

[0004] Obesity is associated with a number of adverse health outcomes, such as insulin resistance, dyslipidemia, glucose intolerance, and coronary heart disease. Features of metabolic syndrome appear to be related to adiposity, in particular visceral fat mass (mesenteric and omental fat depots). The anatomical distribution of adipose tissue can be influenced by glucocorticoids. The enzyme 11β-hydroxysteroid dehydrogenase Type I (11β-HSD1 or HSD1) catalyzes the interconversion of inactive glucocorticoid precursors to active glucocorticoids. In addition to affecting fat topology, glucocorticoids also regulate the differentiation of adipose stromal cells and affect the function of adipocytes (Hauner et al., 1989, J. Clin. Invest. 84:1663-1670; Bronnegard et al., 1995, J. Clin. Endocrinol. Metab. 80:3608-3612). Glucocorticoids are also potent regulators of key enzymes involved in hepatic gluconeogenesis, including phosphoenolpyruvate carboxykinase (PEPCK) and glucose-6-phosphatase (G6 Pase) (reviewed in Barthel and Schmoll, 2003, Am. J. Physiol. Endocrinol. Metab. 285:E685-E692). Thus, HSD1 may play an important role in obesity and metabolic syndrome-related outcomes (reviewed in 2004, Stulnig and Waldhäusl, 2004, Diabetologia 47:1-11; Wolf, 2002, Nutrition Rev. 60:148-151).

[0005] The importance of glucocorticoids as regulators of glucose and lipid homeostasis in humans is exemplified by Cushing's syndrome. Glucocorticoid excess in Cushing's syndrome leads to insulin resistance, diabetes, dyslipidemia, and redistribution of fat to visceral depots (reviewed in Peeke and Chrousos, 1995, Ann. N.Y. Acad. Sci. 771:665-676). Moreover, use of glucocorticoid therapy as anti-inflammatory or immunosupporessive agents is associated with side effects induced by disturbance of glucose metabolism, such as insulin resistance (reviewed in Schäcke et al., 2002, Pharm. Ther. 96:23-43). Draper et al. (2003, Nat. Genet. 34:434-439) demonstrated that mutations in HSD1 and hexose-6-phosphate dehydrogenase interact to cause cortisone reductase deficiency (absence of cortisone activation), which is characterized by obesity, insulin resistance, infertility, and hirsutism. As in the obese Zucker rat model (Livingstone et al., 2000), tissue specific changes in glucocorticoid metabolism were observed in obese humans, with enhanced HSD1 activity in adipose tissue, which may contribute to obesity (Rask et al., 2001, J. Clin. Endocrinol. Metab. 86:1418-1421). In a study of Pima Indians and Caucasians, higher adipose HSD1 activity was associated with adiposity and insulin resistance (Lindsay et al., 2003, J. Clin. Endocrinol. Metab. 88:2738-2744).

[0006] Specific inhibitors of HSD1 have been identified. Arylsulfonamidothiazoles have been shown to be potent and selective inhibitors of HSD1, with no significant activity against HSD2 (Barf et al., 2002, J. Med. Chem. 45:3813-3815). Flavanone has also been identified as an HSD1 specific inhibitor in a rapid screening assay (Schweizer et al., 2003, Mol. Cell. Endocrin. 212:41-49). Carbenoxolone has been found to inhibit hepatic HSD1 reductase activity, resulting in increased hepatic insulin sensitivity (Walker et al., 1995, J. Clin. Endocrinol. Metab. 80:3155-3159). Selective inhibitors of HSD1 useful for the treatment of diabetes, obesity, and other lipid disorders have been disclosed, see for example, U.S. Pat. No. 6,730,690; WO 03/104208, WO 03/104207, and WO 03/065983. WO 04/058741 and WO 04/058730 describe triazole derivatives that are selective inhibitors of HSD1. Amide derivatives have also been described as HSD1 inhibitors (WO04/065351)

[0007] HSD1 is being used to develop targeted therapies for the treatment of obesity and metabolic syndrome. Since HSD1 produces cortisol, inhibition of HSD1 by a small molecule should lead to a decrease in cortisol-related responses. Several small molecules have been evaluated in animal models as agents affecting the different risk factors associated with metabolic syndrome.

[0008] There is a need for assays that are compatible with current clinical laboratory instrumentation and that are capable of identifying HSD1 compounds and estimating the inhibitory activity of HSD1 compounds. Clinically, it is difficult to predict the in vivo efficacy of HSD1 inhibitors based on their pharmacodynamic effects. As mentioned above, a number of HSD1 inhibitor compounds have been described which show a range of in vivo inhibitor activity that is sometimes discordant with their respective pharmacokinetic/pharmacodynamic profiles. Thus, there is also a need for assays that are capable of monitoring off-target effects of inhibitory HSD1 compounds, allowing better classification of compounds before entering animal efficacy studies.

### BRIEF DESCRIPTION OF SEQUENCE LISTING

[0009] This application includes a Sequence Listing submitted on compact disc, recorded on two compact discs, labeled “Copy 1” and “Copy 2” including one duplicate, labeled “Computer Readable Copy”, containing File Name “RS0225.txt”, created on Oct. 20, 2006, consisting of 1,433,600 bytes. The sequence listing on the compact discs is incorporated by reference herein in its entirety.

### DETAILED DESCRIPTION OF THE INVENTION

[0010] This section presents a detailed description of the many aspects and embodiments representative of the inventions disclosed herein. This description is by way of several exemplary illustrations, of varying detail and specificity. Other features and advantages of these embodiments are apparent from the additional descriptions provided herein, including the different examples. The provided examples illustrate different components and methodology useful in practicing various embodiments of the invention. The examples do not limit the claimed invention. Based on the present disclosure the ordinary skilled artisan can identify and employ other components and methodology useful for practicing the present invention.

[0011] Though enzymatically bidirectional, in vivo HSD1 is believed to function as an oxidoreductase, converting inactive cortisone to active cortisol, thereby regulating the degree of glucocorticoid access to its receptors. HSD1 is a particularly attractive target for regulating gluconeogenesis, insulin sensitivity, and other disorders caused by excess glucocorticoid action.

[0012] The cells and methods disclosed and claimed herein are based on the discovery and characterization of gene expression genesets that are specific for: a) cellular response to cortisone as an estimate of HSD1 activity; and b) off-target activity in response to an agent that modulates HSD1 activity. In particular, gene expression profiling data from cultured HepG2 hepatoma cells over-expressing HSD1 were used to identify a set of genes whose expression levels are correlated with response to cortisone treatment and whose gene expression levels are muted by concomitant treatment of an HSD1 inhibitor and cortisone. In one aspect of the invention, the cortisone response geneset is useful to detect HSD1 inhibition in a wide variety of cell samples obtained from in vivo or in vitro sources. In another aspect of the invention, gene expression profiling data from cultured HepG2 cells was used to identify a set of genes that are selectively regulated in response to a specific HSD1 inhibitor and whose expression levels are independent of the presence of cortisone, thus, indicating off-target activity.

[0013] In some embodiments of the invention, the cortisone response signature gene sets, which are disclosed and claimed herein, have utility in the context of providing a method for monitoring the inhibition of HSD1 activity via gene expression profiling. Embodiments of the off-target signature gene sets, which are disclosed and claimed herein, have utility in the context of providing a method for detection of off-target activity and for classification of compounds that modulate HSD1 activity. Another aspect of the present invention relates to hepatoma cell lines that over-expresses HSD1 and methods of use thereof.

### I. DEFINITIONS

[0014] Unless defined otherwise, all technical and scientific terms used herein have the meaning commonly understood by one of ordinary skill in the art to which this invention belongs. Practitioners are particularly directed to Sambrook et al. (1989) Molecular Cloning: A Laboratory Manual, 2d ed., Cold Spring Harbor Press, Plainsview, N.Y. (1989), and Ausubel et al., Current Protocols in Molecular Biology (Supplement 47), John Wiley & Sons, New York (1999), for definitions and terms of the art.

[0015] As used herein, “measuring expression levels,” “obtaining an expression level” and the like, includes methods that quantify a gene expression level of, for example, a transcript of a gene or a protein encoded by a gene, as well as methods that determine whether a gene of interest is expressed at all. Thus, an assay which provides a “yes” or “no” result without necessarily providing quantification, of an amount of expression is an assay that “measures expression” as that phrase is used herein. Alternatively, a measured or obtained expression level may be expressed as any quantitative value, for example, a fold-change in expression, up or down, relative to a control gene or relative to the same gene in another sample, or a log ratio of expression, or any visual representation thereof, such as, for example, a “heatmap” where a color intensity is representative of the amount of gene expression detected. Exemplary methods for detecting the level of expression of a gene include, but are not limited to, Northern blotting, dot or slot blots, reporter gene matrix (see for example, U.S. Pat. No. 5,569,588) nuclease protection, RT-PCR, microarray profiling, differential display, 2D gel electrophoresis, SELDI-TOF, ICAT, enzyme assay, antibody assay, and the like.

[0016] The term “gene expression”, as used herein, refers to the process of transcription and translation of a gene to produce a gene product, be it RNA or protein. Thus, modulation of gene expression may occur at any one or more of many levels, including transcription, post-transcriptional processing, translation, post-translational modification, and the like.

[0017] As used herein, “HSD1” refers to a protein having 11-β-Hydroxysteroid Dehydrogenase Type I activity (HSD1 activity). HSD1 is alternatively known in the art as 11-β-HSD1 or HSD11β1. Exemplary sequences include, for example, the human HSD1 protein, encoded by a nucleic acid molecule, NM_{—}005525, comprising SEQ ID NO: 1. An amino acid sequence for human HSD1, Ref Seq NP_{—}005516, is provided by SEQ ID NO: 2. In addition, “HSD1” is not limited to human HSD1 proteins. The methods exemplified herein may also be used with HSD1 sequences identified in other species, such as, but not limited to, chimpanzee, rat, mouse, and dog. An exemplary chimpanzee HSD1 protein, SEQ ID NO: 3, is encoded by a nucleic acid molecule comprising SEQ ID NO: 4. An exemplary rat HSD1 protein, SEQ ID NO: 5, is encoded by a nucleic acid molecule comprising SEQ ID NO: 6. An exemplary mouse HSD1 protein, SEQ ID NO: 7, is encoded by a nucleic acid molecule comprising SEQ ID NO: 8. An exemplary dog HSD1 protein, SEQ ID NO: 9, is encoded by SEQ ID NO: 10.

[0018] As used herein, “HSD1” refers to a polynucleotide encoding HSD1.

[0019] The term “HSD1 activity”, as used herein, refers to the oxidoreductase function of HSD1, which converts inactive glucocorticoids (cortisone in humans and 11-dehydrocorticosterone in rats and mice) into their active forms (cortisol and corticosterone, respectively).

[0020] The term “HSD1-agent”, as used herein, refers to any substance which alters HSD1 activity. Thus, the HSD1-agent may be a chemical compound, such as a small molecule or complex organic compound, a protein, an antibody, or a genetic construct which acts at the DNA, mRNA, or protein level in a subject. The HSD1-agent may act directly or indirectly, and may modulate the activity of a substance which itself modulates the activity of HSD1.

[0021] As used herein, an “isolated nucleic acid” is a nucleic acid molecule that exists in a physical form that is non-identical to any nucleic acid molecule of identical sequence as found in nature; “isolated” does not require, although it does not prohibit, that the nucleic acid so described has itself been physically removed from its native environment. For example, a nucleic acid can be said to be “isolated” when it includes nucleotides and/or internucleoside bonds not found in nature. When instead composed of natural nucleosides in phosphodiester linkage, a nucleic acid can be said to be “isolated” when it exists at a purity not found in nature, where purity can be adjudged with respect to the presence of nucleic acids of other sequence, with respect to the presence of proteins, with respect to the presence of lipids, or with respect to the presence of any other component of a biological cell, or when the nucleic acid lacks sequence that flanks an otherwise identical sequence in an organism's genome, or when the nucleic acid possesses sequence not identically present in nature. As so defined, “isolated nucleic acid” includes nucleic acids integrated into a host cell chromosome at a heterologous site, recombinant fusions of a native fragment to a heterologous sequence, recombinant vectors present as episomes or as integrated into a host cell chromosome.

[0022] The phrases “isolated protein”, “isolated polypeptide”, “isolated peptide” and “isolated oligopeptide” refer to a protein (or respectively to a polypeptide, peptide, or oligopeptide) that is non-identical to any protein molecule of identical amino acid sequence as found in nature; “isolated” does not require, although it does not prohibit, that the protein so described has itself been physically removed from its native environment. For example, a protein can be said to be “isolated” when it includes amino acid analogues or derivatives not found in nature, or includes linkages other than standard peptide bonds. When instead composed entirely of natural amino acids linked by peptide bonds, a protein can be said to be “isolated” when it exists at a purity not found in nature—where purity can be adjudged with respect to the presence of proteins of other sequence, with respect to the presence of non-protein compounds, such as nucleic acids, lipids, or other components of a biological cell, or when it exists in a composition not found in nature, such as in a host cell that does not naturally express that protein.

[0023] The terms “over-expression”, “over-expresses”, “over-expressing” and the like, refer to the state of altering a subject such that expression of one or more genes in said subject is significantly higher, as determined using one or more statistical tests, than the level of expression of said gene or genes in the same unaltered subject or an analogous unaltered subject.

[0024] A “purified nucleic acid” represents at least 10% of the total nucleic acid present in a sample or preparation. In preferred embodiments, the purified nucleic acid represents at least about 50%, at least about 75%, or at least about 95% of the total nucleic acid in a isolated nucleic acid sample or preparation. Reference to “purified nucleic acid” does not require that the nucleic acid has undergone any purification and may include, for example, chemically synthesized nucleic acid that has not been purified.

[0025] As used herein, a “purified polypeptide” (equally, a purified protein, peptide, or oligopeptide) represents at least 10% of the total protein present in a sample or preparation, as measured on a weight basis with respect to total protein in a composition. In preferred embodiments, the purified polypeptide represents at least about 50%, at least about 75%, or at least about 95% of the total protein in a sample or preparation. A “substantially purified protein” (equally, a substantially purified polypeptide, peptide, or oligopeptide) is an isolated protein, as above described, present at a concentration of at least 70%, as measured on a weight basis with respect to total protein in a composition. Reference to “purified polypeptide” does not require that the polypeptide has undergone any purification and may include, for example, chemically synthesized polypeptide that has not been purified.

[0026] As used herein, the percent “sequence identity” of two amino acid sequences is determined using the BLAST family of programs (Altschul et al., 1990, J. Mol. Biol., 215, 403-410; Altschul et al., 1997, Nucleic Acids Res., 25:389-3402, available from the National Center for Biotechnology Information (NCBI), Bethesda, Md., USA and accessible through the home page of the NCBI at ncbi.nlm.nih.gov/BLAST/) using the default settings. Preferably, the BLOSUM62 amino acid substitution matrix (Henikoff and Henikoff, 1992, Proc. Nat. Acad. Sci. USA, 89:10915-10919) is used in polypeptide sequence comparisons including where nucleotide sequences are first translated into amino acid sequences before comparison.

[0027] As used herein, “specific binding” refers to the ability of two molecular species concurrently present in a heterogeneous (inhomogeneous) sample to bind to one another in preference to binding to other molecular species in the sample. Typically, a specific binding interaction will discriminate over adventitious binding interactions in the reaction by at least two-fold, more typically by at least 10-fold, often at least 100-fold; when used to detect analyte, specific binding is sufficiently discriminatory when determinative of the presence of the analyte in a heterogeneous (inhomogeneous) sample. Typically, the affinity or avidity of a specific binding reaction is least about 1 μM.

[0028] As used herein, “subject”, as refers to an organism and to cells or tissues derived therefrom, including, for example, cultured cell lines. For example, an organism may be an animal, including but not limited to, an animal, such as a cow, a pig, a mouse, a rat, a chicken, a cat, a dog, etc., and is usually a mammal, such as a human.

### II. ASPECTS AND EMBODIMENTS OF THE INVENTION

### A. HepG2 Cells Over-Expressing HSD1

[0029] A first aspect of the invention provides a human hepatoma cell line that has been modified to over-express HSD1. In one embodiment, the HSD1 is expressed from a polynucleotide comprising a sequence encoding human HSD1. An exemplary human HSD1 nucleic acid sequence is SEQ ID NO: 1. In another embodiment, the over expressed HSD1 is encoded by any polynucleotide sequence that encodes SEQ ID NO: 2. In other embodiments, the over-expressed HSD1 comprises a sequence encoding a polypeptide having at least 95% sequence identity to SEQ ID NO: 2. In another embodiment, the HepG2 hepatoma cell line over-expresses HSD1 at least about 2-fold higher, at least about 5-fold higher, or at least about 10-fold higher compared to expression in a non-modified hepatoma cell line. In addition, embodiments of this aspect may be practiced using non-human HSD1. For example, a human hepatoma cell line can be made that over-expresses non-human HSD1 sequences identified in other species, such as, but not limited to, rat HSD1, NP_{—}058776 (SEQ ID NO: 5), mouse HSD1, NP_{—}032314 (SEQ ID NO: 7), chimpanzee HSD1, XP_{—}514165 (SEQ ID NO: 3) or chimeric HSD1 made by combining sequences from one or more species, so long as the overexpressed HSD1 has detectable HSD1 activity in the human hepatoma cell line. Methods for detecting HSD1 activity are known in the art. One such method for detecting HSD1 activity is disclosed in Example 1 herein. Functional variants of the above HSD1 sequences may also be used in the practice of certain aspects of the invention. Functional variants have a detectable level of HSD1 activity. In some embodiments of the invention, functional HSD1 variants have at least 95% sequence identity to one or more of the above listed mammalian HSD1 proteins. In other embodiments of the invention, functional HSD1 variants have at least 90% sequence identity or at least 85% sequence identity to one or more of the above listed mammalian HSD1 proteins.

[0030] An exemplary human hepatoma cell line is HepG2 hepatoma cell line (ATCC HB8065) (Knowles et al., 1980, Science 209:497-499). Methods for the preparation and propagation of HepG2 hepatoma cells have been disclosed (see U.S. Pat. No. 4,393,133). In other embodiments of the invention, HSD1 over-expression may be achieved in other human hepatoma cell lines, including but not limited to HuH-7 (Nakabayashi et al., 1982, Cancer Res. 42:3858-3863). HSD1 expression may also be achieved in cell lines from other mammalian species and used with the methods described herein, providing that the cell line also expresses a glucocorticoid receptor, either endogenous or recombinant, capable of responding to the active glucocorticoid product of HSD1, cortisol or corticosterone. An exemplary human glucocorticoid receptor (GCCR or NR3C1) is provided by NP_{—}000167 (SEQ ID NO: 11).

[0031] A HepG2 cell line over-expressing HSD1 can be used, for example, in assays to estimate HSD1 activity in response to cortisone, to identify agents that modify the activity of HSD1, or to rank order agents that modify HSD1 activity according to changes in cortisone response signature gene expression levels. Alternatively, the HepG2 cell line can be used in assays to classify HSD1 agents by monitoring HSD1 off-target activity.

[0032] A number of approaches to achieve over-expression of HSD1 in hepatoma cells can be used. In some embodiments, expression is achieved in a host cell using an expression vector comprising a polynucleotide encoding active HSD1. An exemplary expression vector contains, for example, a recombinant nucleic acid encoding an HSD1 polypeptide operably linked with regulatory elements for proper transcription and processing. The regulatory elements that may be present include those naturally associated with the recombinant nucleic acid and exogenous regulatory elements not naturally associated with the recombinant nucleic acid. Exogenous regulatory elements such as an exogenous promoter can be useful for expressing recombinant nucleic acid in a particular host.

[0033] Generally, the regulatory elements that are present in an expression vector include a transcriptional promoter, a ribosome binding site, a terminator, and an optionally present operator. Another preferred element is a polyadenylation signal providing for processing in eukaryotic cells. In most embodiments, an expression vector also contains an origin of replication for autonomous replication in a host cell, a selectable marker, a limited number of useful restriction enzyme sites, and a potential for high copy number. Examples of expression vectors are cloning vectors, modified cloning vectors, and specifically designed plasmids, viruses or transposons.

[0034] In most embodiments, the promoter element is typically selected from promoters that are functional in mammalian cells, although prokaryotic promoters and promoters functional in other eukaryotic cells can be used. The promoter is typically selected from promoter sequences of viral or eukaryotic genes. The promoter can be a promoter that functions in a ubiquitous manner, e.g., are functional in a large number of cell types, such as, for example, promoters of α-actin or β-actin or, alternatively, a tissue-specific manner. In some embodiments of the invention, tissue-specific promoters functional in hepatocytes may be used. In other embodiments promoters are selected that respond to specific stimuli, such as, promoters that bind steroid hormone receptors. In still other embodiments viral promoters may be used, for example, the Rous sarcoma virus (RSV) LTR promoter. Other examples of useful promoters are inducible promoters can be used to modulate, e.g., turn on and off or otherwise change the level of expression of HSD1 during the life-time of the cells in which the HSD1 over-expressing vector construct is present. Chimeric promoters comprising sequence elements from two or more different promoters may also be used. Additionally, any of these promoters, or the endogenous HSD1 promoter in the host cell, can be modified by additional of regulatory sequences, such as enhancer sequences.

[0035] Expression vectors providing suitable levels of polypeptide expression in different hosts are well known in the art. Mammalian expression vectors well known in the art include, but are not restricted to, pcDNA3 (Invitrogen, Carlsbad Calif.), pSecTag2 (Invitrogen), pMC1neo (Stratagene, La Jolla Calif.), pXT1 (Stratagene), pSG5 (Stratagene), pCMVLacI (Stratagene), pCI-neo (Promega), EBO-pSV2-neo (ATCC 37593), pBPV-1(8-2) (ATCC 37110), pdBPV-MMTneo(342-12) (ATCC 37224), pRSVgpt (ATCC 37199), pRSVneo (ATCC 37198), pSV2-dhfr (ATCC 37146) and pUCTag (ATCC 37460).

[0036] A number of viral-based expression systems can be used to express HSD1 polypeptides in mammalian host cells. For example, if an adenovirus is used as an expression vector, sequences encoding HSD1 polypeptides can be ligated into an adenovirus transcription/translation complex comprising the late promoter and tripartite leader sequence. Insertion in a non-essential E1 or E3 region of the viral genome can be used to obtain a viable virus which is capable of expressing a HSD1 polypeptide in infected host cells (Logan and Shenk, 1984, Proc. Natl. Acad. Sci. 81:3655-3659). If desired, transcription enhancers, such as the Rous sarcoma virus (RSV) enhancer, can be used to increase expression in mammalian host cells.

[0037] Alternatively, the expression vector comprises a transposable element that contains an HSD1 gene that when transposed into a target cell chromosome is expressed thereby over-producing HSD1. Exemplary transposons include Sleeping Beauty (Essner et al., 2005 Curr. Opin. Pharmacol. 5:513-519) and piggyBac (Ding et al., 2005, Cell 122:473-483), as well as any other transposable elements that are functional in human cells.

[0038] Human artificial chromosomes (HACs) also can be used to deliver larger fragments of DNA than can be contained and expressed in a plasmid. HACs of 6 to 10 megabases (Mb) are constructed and delivered to cells via conventional delivery methods (e.g., liposomes, polycationic amino polymers, or vesicles).

[0039] In still other embodiments, an endogenous HSD1 gene that is normally transcriptionally inactive in HepG2 cells is activated by recombination of an exogenously engineered polynucleotide containing a transcription promoter that is active in HepG2 cells. Exemplary methods and vectors for recombination based endogenous gene activation are described in U.S. Pat. No. 5,641,670; U.S. Pat. No. 5,733,761; U.S. Pat. No. 6,187,305; U.S. Pat. No. 6,623,958; and U.S. Pat. No. 6,576,443.

[0040] In some embodiments of the invention, long-term, high yield intracellular expression of HSD1 protein may be desired. Stable expression of HSD1 in cell lines can be achieved using expression vectors which contain an origin of DNA replication functional in the target cell, such as for example a viral origin of DNA replication, and/or endogenous expression elements and a selectable marker gene on the same or on a separate vector. Alternatively, stable expression may be obtained via recombination of an exogenously provided HSD1 gene as described previously. The selectable marker allows growth and recovery of cells which successfully express the introduced HSD1 enzyme sequences. Resistant clones of stable transformed cells can be proliferated using tissue culture techniques appropriate to the cell type. See for example, ANIMAL CELL CULTURE, R. I. Freshney, ed., 1986. Selection systems include, but are not limited to herpes simplex virus thymidine kinase, adenine phosphoribosyltransferase, antibiotic resistance, antimetabolite resistance, and visible markers such as luciferase.

[0041] Lipsomal administration of a modulator that increases HSD1 expression, such as C/EBPα (Williams et al., 2000, J. Biol. Chem. 275:30232-30239), may also be used to stimulate HSD1 expression. Alternatively a host cell can be transformed or transfected with an expression vector encoding an HSD1 modulator to achieve increased expression of endogenous or exogenous (encoded in a vector) HSD1, providing the appropriate binding sites for the modulator are not excluded in the vector encoded HSD1 gene.

[0042] Recombinant DNA molecules that feature precise fusions of polynucleotide sequences can also be assembled using standard recombinational subcloning techniques. Recombination-mediated, PCR-directed, or PCR-independent plasmid construction in yeast is well known in the art (see Hua et al., 1997, Plasmid 38:91-96; Hudson et al., 1997, Genome Res. 7:1169-1173; Oldenburg et al., 1997, Nucleic Acids Res. 25:451-452; Raymond et al., 1999, BioTechniques 26:134-8, 140-1). Overlapping sequences between the donor DNA fragments and the acceptor plasmid permit recombination in yeast. An example of recombination-mediated plasmid construction in Saccharomyces cerevisiae is described in Oldenburg et al. (1997, Nucleic Acids Res. 25:451-452): a DNA segment of interest was amplified by PCR so that the PCR product had 20-40 by of homology at each end to the region of the plasmid at which recombination was to occur. The PCR product and linearized plasmid were co-transformed into yeast, and recombination resulted in replacement of the region between the homologous sequences on the plasmid with the region carried by the PCR fragment. The recombinational method of plasmid construction bypasses the need for extensive modification and ligation steps and does not rely on available restriction sites. These cloning vectors can then be utilized for protein expression in multiple systems, including, for example, HepG2 hepatoma cell lines.

[0043] In another embodiment of the invention, nucleic acid sequences encoding HSD1 may be ligated to a heterologous sequence resulting in translation of a fusion protein in any of the aforementioned host systems. For example, a chimeric HSD1 protein containing a heterologous moiety that can be recognized by a commercially available antibody may facilitate detection and quantification of HSD1 expression in the host system. Heterologous protein and peptide moieties may also facilitate purification of fusion proteins using commercially available affinity matrices. Such moieties include, but are not limited to, glutathione S-transferase (GST), maltose binding protein (MBP), thioredoxin (Trx), calmodulin binding peptide (CBP), 6-His, FLAG, c-myc, and hemagglutinin (HA). GST, MBP, Trx, CBP, and 6-His enable purification of their cognate fusion proteins on immobilized glutathione, maltose, phenylarsine oxide, calmodulin, and metal-chelate resins, respectively. FLAG, c-myc, and hemagglutinin (HA) enable immunoaffinity purification of fusion proteins using commercially available monoclonal and polyclonal antibodies that specifically recognize these epitope tags. A fusion protein may also be engineered to contain a proteolytic cleavage site located between the HSD1 encoding sequence and the heterologous protein sequence, so that HSD1 may be cleaved away from the heterologous moiety following purification. Methods for fusion protein expression and purification are discussed in Ausubel (Current Protocols in Molecular Biology, John Wiley, 1987-1998). A variety of commercially available kits may also be used to facilitate expression and purification of fusion proteins.

[0044] To enhance expression in a particular host it may be useful to modify the HSD1 coding sequence to take into account codon usage of the host. Codon usages of different organisms are well known in the art (see, Ausubel, Current Protocols in Molecular Biology, John Wiley, 1987-1998, Supplement 33 Appendix 1C).

[0045] Expression vectors may be introduced into host cells using standard techniques. Examples of such techniques include transformation, transfection, lipofection, protoplast fusion, and electroporation.

[0046] Nucleic acids encoding for a polypeptide can be expressed in a cell without the use of an expression vector employing, for example, synthetic mRNA or native mRNA. Introduction of mRNA into cell based systems can be achieved, for example, by microinjection or electroporation. A variety of methods are well known in the art for manipulating the expression of a gene of interest. It is to be understood that methods other than those exemplified herein may be used to manipulate hepatoma cell lines so that they express HSD1 activity.

### III. DETECTING GENE EXPRESSION BY MEASURING GENE TRANSCRIPT EXPRESSION

[0047] In some aspects of the present invention, gene expression levels are measured in cells of a cell type that have been contacted with an agent. Gene expression may be measured, for example, by extracting (and optionally purifying) mRNA from the living thing, and using the mRNA as a template to synthesize cDNA which is then labeled (e.g., with a fluorescent dye) and can be used to measure gene expression. While the following exemplary description is directed to embodiments of the invention in which the extracted mRNA is used as a template to synthesize cDNA, which is then labeled, it will be understood that the extracted mRNA can also be used as a template to synthesize cRNA which can then be labeled and can be used to measure gene expression.

[0048] RNA molecules useful as templates for cDNA synthesis can be isolated from any organism or part thereof, including organs, tissues, and/or individual cells. Any suitable RNA preparation can be utilized, such as total cellular RNA, or such as cytoplasmic RNA or such as an RNA preparation that is enriched for messenger RNA (mRNA), such as RNA preparations that include greater than 70%, or greater than 80%, or greater than 90%, or greater than 95%, or greater than 99% messenger RNA. Typically, RNA preparations that are enriched for messenger RNA are utilized to provide the RNA template in the practice of the methods of this aspect of the invention. Messenger RNA can be purified in accordance with any art-recognized method, such as by the use of oligo-dT columns (see, e.g., Sambrook et al., 1989, Molecular Cloning—A Laboratory Manual (2nd Ed.), Vol. 1, Chapter 7, Cold Spring Harbor Laboratory, Cold Spring Harbor, N.Y.).

[0049] Total RNA may be isolated from cells by procedures that involve breaking open the cells and, typically, denaturation of the proteins contained therein. Additional steps may be employed to remove DNA. Cell lysis may be accomplished with a nonionic detergent, followed by microcentrifugation to remove the nuclei and hence the bulk of the cellular DNA. In one embodiment, RNA is extracted from cells using guanidinium thiocyanate lysis followed by CsCl centrifugation to separate the RNA from DNA (Chirgwin et al., 1979, Biochemistry 18:5294-5299). Messenger RNA may be selected with oligo-dT cellulose (see Sambrook et al., supra). Separation of RNA from DNA can also be accomplished by organic extraction, for example, with hot phenol or phenol/chloroform/isoamyl alcohol. If desired, RNase inhibitors may be added to the lysis buffer. Likewise, for certain cell types, it may be desirable to add a protein denaturation/digestion step to the protocol.

[0050] The sample of total RNA typically includes a multiplicity of different mRNA molecules, each different mRNA molecule having a different nucleotide sequence (although there may be multiple copies of the same mRNA molecule). In a specific embodiment, the mRNA molecules in the RNA sample comprise at least 100 different nucleotide sequences. In other embodiments, the mRNA molecules of the RNA sample comprise at least 500, 1,000, 5,000, 10,000, 20,000, 30,000, 40,000, 50,000, 60,000, 70,000, 80,000, 90,000 or 100,000 different nucleotide sequences. In another specific embodiment, the RNA sample is a mammalian RNA sample, the mRNA molecules of the mammalian RNA sample comprising about 20,000 to 30,000 different nucleotide sequences, or comprising substantially all of the different mRNA sequences that are expressed in the cell(s) from which the mRNA was extracted.

[0051] In the context of the present example, cDNA molecules are synthesized that are complementary to the RNA template molecules. Each cDNA molecule is preferably sufficiently long (e.g., at least 50 nucleotides in length) to subsequently serve as a specific probe for the mRNA template from which it was synthesized, or to serve as a specific probe for a DNA sequence that is identical to the sequence of the mRNA template from which the cDNA molecule was synthesized. Individual DNA molecules can be complementary to a whole RNA template molecule, or to a portion thereof. Thus, a population of cDNA molecules is synthesized that includes individual DNA molecules that are each complementary to all, or to a portion, of a template RNA molecule. Typically, at least a portion of the complementary sequence of at least 95% (more typically at least 99%) of the template RNA molecules are represented in the population of cDNA molecules.

[0052] Any reverse transcriptase molecule can be utilized to synthesize the cDNA molecules, such as reverse transcriptase molecules derived from Moloney murine leukemia virus (MMLV-RT), avian myeloblastosis virus (AMV-RT), bovine leukemia virus (BLV-RT), Rous sarcoma virus (RSV) and human immunodeficiency virus (HIV-RT). A reverse transcriptase lacking RNaseH activity (e.g., SUPERSCRIPT II™ sold by Stratagene, La Jolla, Calif.) has the advantage that, in the absence of an RNaseH activity, synthesis of second strand cDNA molecules does not occur during synthesis of first strand cDNA molecules. The reverse transcriptase molecule should also preferably be thermostable so that the cDNA synthesis reaction can be conducted at as high a temperature as possible, while still permitting hybridization of any required primer(s) to the RNA template molecules.

[0053] The synthesis of the cDNA molecules can be primed using any suitable primer, typically an oligonucleotide in the range of ten to 60 bases in length. Oligonucleotides that are useful for priming the synthesis of the cDNA molecules can hybridize to any portion of the RNA template molecules, including the oligo-dT tail. In some embodiments, the synthesis of the cDNA molecules is primed using a mixture of primers, such as a mixture of primers having random nucleotide sequences. Typically, for oligonucleotide molecules less than 100 bases in length, hybridization conditions are 5° C. to 10° C. below the homoduplex melting temperature (Tm); see generally, Sambrook et al. Molecular Cloning: A Laboratory Manual, 2nd ed., Cold Spring Harbor Press, 1987; Ausubel et al., Current Protocols in Molecular Biology, Greene Publishing, 1987).

[0054] A primer for priming cDNA synthesis can be prepared by any suitable method, such as phosphotriester and phosphodiester methods of synthesis, or automated embodiments thereof. It is also possible to use a primer that has been isolated from a biological source, such as a restriction endonuclease digest. An oligonucleotide primer can be DNA, RNA, chimeric mixtures or derivatives or modified versions thereof, so long as it is still capable of priming the desired reaction. The oligonucleotide primer can be modified at the base moiety, sugar moiety, or phosphate backbone, and may include other appending groups or labels, so long as it is still capable of priming cDNA synthesis.

[0055] An oligonucleotide primer for priming cDNA synthesis can be derived by cleavage of a larger nucleic acid fragment using non-specific nucleic acid cleaving chemicals or enzymes or site-specific restriction endonucleases; or by synthesis by standard methods known in the art, e.g., by use of an automated DNA synthesizer (such as are commercially available from Biosearch, Applied Biosystems, etc.) and standard phosphoramidite chemistry. As examples, phosphorothioate oligonucleotides may be synthesized by the method of Stein et al. (1988, Nucl. Acids Res. 16:3209-3221), methylphosphonate oligonucleotides can be prepared by use of controlled pore glass polymer supports (Sarin et al., 1988, Proc. Natl. Acad. Sci. U.S.A. 85:7448-7451).

[0056] Once the desired oligonucleotide is synthesized, it is cleaved from the solid support on which it was synthesized and treated, by methods known in the art, to remove any protecting groups present. The oligonucleotide may then be purified by any method known in the art, including extraction and gel purification. The concentration and purity of the oligonucleotide may be determined, for example, by examining the oligonucleotide that has been separated on an acrylamide gel, or by measuring the optical density at 260 nm in a spectrophotometer.

[0057] After cDNA synthesis is complete, the RNA template molecules can be hydrolyzed, and all, or substantially all (typically more than 99%), of the primers can be removed. Hydrolysis of the RNA template can be achieved, for example, by alkalinization of the solution containing the RNA template (e.g., by addition of an aliquot of a concentrated sodium hydroxide solution). The primers can be removed, for example, by applying the solution containing the RNA template molecules, cDNA molecules, and the primers, to a column that separates nucleic acid molecules on the basis of size. The purified, cDNA molecules, can then, for example, be precipitated and re-dissolved in a suitable buffer.

[0058] The cDNA molecules are typically labeled to facilitate the detection of the cDNA molecules when they are used as a probe in a hybridization experiment, such as a probe used to screen a DNA microarray, to identify an efficacy-related population of genes. The cDNA molecules can be labeled with any useful label, such as a radioactive atom (e.g., ³²P), but typically the cDNA molecules are labeled with a dye. Examples of suitable dyes include fluorophores and chemiluminescers.

[0059] By way of example, cDNA molecules can be coupled to dye molecules via aminoallyl linkages by incorporating allylamine-derived nucleotides (e.g., allylamine-dATP, allylamine-dCTP, allylamine-dGTP, and/or allylamine-dTTP) into the cDNA molecules during synthesis of the cDNA molecules. The allylamine-derived nucleotide(s) can then be coupled, via an aminoallyl linkage, to N-hydroxysuccinimide ester derivatives (NHS derivatives) of dyes (e.g., Cy-NHS, Cy3-NHS and/or Cy5-NHS). Again by way of example, in another embodiment, dye-labeled nucleotides may be incorporated into the cDNA molecules during synthesis of the cDNA molecules, which labels the cDNA molecules directly.

[0060] It is also possible to include a spacer (usually 5-16 carbon atoms long) between the dye and the nucleotide, which may improve enzymatic incorporation of the modified nucleotides during synthesis of the cDNA molecules.

[0061] In the context of the present example, the labeled cDNA is hybridized to a DNA array that includes hundreds, or thousands, of identified nucleic acid molecules (e.g., cDNA molecules) that correspond to genes that are expressed in the type of cells wherein gene expression is being analyzed. Typically, hybridization conditions used to hybridize the labeled cDNA to a DNA array are no more than 25° C. to 30° C. (for example, 10° C.) below the melting temperature (Tm) of the native duplex of the cDNA that has the lowest melting temperature (see generally, Sambrook et al. Molecular Cloning: A Laboratory Manual, 2nd ed., Cold Spring Harbor Press, 1987; Ausubel et al., Current Protocols in Molecular Biology, Greene Publishing, 1987). Tm for nucleic acid molecules greater than about 100 bases can be calculated by the formula Tm=81.5+0.41% (G+C)−log(Na+). For oligonucleotide molecules less than 100 bases in length, exemplary hybridization conditions are 5° to 10° C. below Tm.

[0062] A. Preparation of microarrays. Nucleic acid molecules can be immobilized on a solid substrate by any art-recognized means. For example, nucleic acid molecules (such as DNA or RNA molecules) can be immobilized to nitrocellulose, or to a synthetic membrane capable of binding nucleic acid molecules, or to a nucleic acid microarray, such as a DNA microarray. A DNA microarray, or chip, is a microscopic array of DNA fragments, such as synthetic oligonucleotides, disposed in a defined pattern on a solid support, wherein they are amenable to analysis by standard hybridization methods (see, Schena, BioEssays 18:427, 1996).

[0063] The DNA in a microarray may be derived, for example, from genomic or cDNA libraries, from fully sequenced clones, or from partially sequenced cDNAs known as expressed sequence tags (ESTs). Methods for obtaining such DNA molecules are generally known in the art (see, e.g., Ausubel et al. (eds.), 1994, Current Protocols in Molecular Biology, Vol. 2, Current Protocols Publishing, New York). Again by way of example, oligonucleotides may be synthesized by conventional methods, such as the methods described herein.

[0064] Microarrays can be made in a number of ways, of which several are described below. However produced, microarrays preferably share certain characteristics. The arrays are preferably reproducible, allowing multiple copies of a given array to be produced and easily compared with each other. Preferably the microarrays are small, usually smaller than 5 cm², and they are made from materials that are stable under nucleic acid hybridization conditions. A given binding site or unique set of binding sites in the microarray should specifically bind the product of a single gene (or a nucleic acid molecule that represents the product of a single gene, such as a cDNA molecule that is complementary to all, or to part, of an mRNA molecule). Although there may be more than one physical binding site (hereinafter “site”) per specific gene product, for the sake of clarity the discussion below will assume that there is a single site.

[0065] In one embodiment, the microarray is an array of polynucleotide probes, the array comprising a support with at least one surface and typically at least 100 different polynucleotide probes, each different polynucleotide probe comprising a different nucleotide sequence and being attached to the surface of the support in a different location on the surface. For example, the nucleotide sequence of each of the different polynucleotide probes can be in the range of 40 to 80 nucleotides in length. For example, the nucleotide sequence of each of the different polynucleotide probes can be in the range of 50 to 70 nucleotides in length. For example, the nucleotide sequence of each of the different polynucleotide probes can be in the range of 50 to 60 nucleotides in length. In specific embodiments, the array comprises polynucleotide probes of at least 2,000, 4,000, 10,000, 15,000, 20,000, 50,000, 80,000, or 100,000 different nucleotide sequences.

[0066] Thus, the array can include polynucleotide probes for most, or all, genes expressed in a cell, tissue, organ or organism. In a specific embodiment, the cell or organism is a mammalian cell or organism. In another specific embodiment, the cell or organism is a human cell or organism. In specific embodiments, the nucleotide sequences of the different polynucleotide probes of the array are specific for at least 50%, at least 75%, at least 80%, at least 85%, at least 90%, at least 95%, or at least 99% of the genes in the genome of the cell or organism. Most preferably, the nucleotide sequences of the different polynucleotide probes of the array are specific for all of the genes in the genome of the cell or organism. In specific embodiments, the polynucleotide probes of the array hybridize specifically and distinguishably to at least 10,000, to at least 20,000, to at least 50,000, to at least 80,000, or to at least 100,000 different polynucleotide sequences. In other specific embodiments, the polynucleotide probes of the array hybridize specifically and distinguishably to at least 90%, at least 95%, or at least 99% of the genes or gene transcripts of the genome of a cell or organism. Most preferably, the polynucleotide probes of the array hybridize specifically and distinguishably to the genes or gene transcripts of the entire genome of a cell or organism.

[0067] In specific embodiments, the array has at least 100, at least 250, at least 1,000, or at least 2,500 probes per 1 cm², preferably all or at least 25% or 50% of which are different from each other. In another embodiment, the array is a positionally addressable array (in that the sequence of the polynucleotide probe at each position is known). In another embodiment, the nucleotide sequence of each polynucleotide probe in the array is a DNA sequence. In another embodiment, the DNA sequence is a single-stranded DNA sequence. The DNA sequence may be, e.g., a cDNA sequence, or a synthetic sequence.

[0068] When a cDNA molecule that corresponds to an mRNA of a cell is made and hybridized to a microarray under suitable hybridization conditions, the level of hybridization to the site in the array corresponding to any particular gene will reflect the prevalence in the cell of mRNA transcribed from that gene. For example, when detectably labeled (e.g., with a fluorophore) DNA complementary to the total cellular mRNA is hybridized to a microarray, the site on the array corresponding to a gene (i.e., capable of specifically binding the product of the gene) that is not transcribed in the cell will have little or no signal (e.g., fluorescent signal), and a gene for which the encoded mRNA is prevalent will have a relatively strong signal.

[0069] In some embodiments, cDNA molecule populations prepared from RNA from two different cell populations, or tissues, or organs, or whole organisms, are hybridized to the binding sites of the array. A single array can be used to simultaneously screen more than one cDNA sample. For example, in the context of the present invention, a single array can be used to simultaneously screen a cDNA sample prepared from a living thing that has been contacted with an agent (e.g., candidate HSD1 inhibitor agent), and the same type of living thing that has not been contacted with the agent. The cDNA molecules in the two samples are differently labeled so that they can be distinguished. In one embodiment, for example, cDNA molecules from a cell population treated with a drug is synthesized using a fluorescein-labeled NTP, and cDNA molecules from a control cell population, not treated with the drug, is synthesized using a rhodamine-labeled NTP. When the two populations of cDNA molecules are mixed and hybridized to the DNA array, the relative intensity of signal from each population of cDNA molecules is determined for each site on the array, and any relative difference in abundance of a particular mRNA detected.

[0070] In this representative example, the cDNA molecule population from the drug-treated cells will fluoresce green when the fluorophore is stimulated, and the cDNA molecule population from the untreated cells will fluoresce red. As a result, when the drug treatment has no effect, either directly or indirectly, on the relative abundance of a particular mRNA in a cell, the mRNA will be equally prevalent in treated and untreated cells and red-labeled and green-labeled cDNA molecules will be equally prevalent. When hybridized to the DNA array, the binding site(s) for that species of RNA will emit wavelengths characteristic of both fluorophores (and appear brown in combination). In contrast, when the drug-exposed cell is treated with a drug that, directly or indirectly, increases the prevalence of the mRNA in the cell, the ratio of green to red fluorescence will increase. When the drug decreases the mRNA prevalence, the ratio will decrease.

[0071] The use of a two-color fluorescence labeling and detection scheme to define alterations in gene expression has been described, e.g., in Schena et al., 1995, Science 270:467-470, which is incorporated by reference in its entirety for all purposes. An advantage of using cDNA molecules labeled with two different fluorophores is that a direct and internally controlled comparison of the mRNA levels corresponding to each arrayed gene in two cell states can be made, and variations due to minor differences in experimental conditions (e.g., hybridization conditions) will not affect subsequent analyses. However, it will be recognized that it is also possible to use cDNA molecules from a single cell, and compare, for example, the absolute amount of a particular mRNA in, e.g., a drug-treated or an untreated cell.

[0072] Exemplary microarrays and methods for their manufacture and use are set forth in Hughes et al., 2001, Nature Biotechnology 19:342-347.

[0073] B. Preparation of nucleic acid molecules for immobilization on microarrays. As noted above, the “binding site” to which a particular, cognate, nucleic acid molecule specifically hybridizes is usually a nucleic acid, or nucleic acid analogue, attached at that binding site. In one embodiment, the binding sites of the microarray are DNA polynucleotides corresponding to at least a portion of some or all genes in an organism's genome. These DNAs can be obtained by, for example, polymerase chain reaction (PCR) amplification of gene segments from genomic DNA, cDNA (e.g., by reverse transcription or RT-PCR), or cloned sequences. Nucleic acid amplification primers are chosen, based on the known sequence of the genes or cDNA, that result in amplification of unique fragments (i.e., fragments that typically do not share more than 10 bases of contiguous identical sequence with any other fragment on the microarray). Computer programs are useful in the design of primers with the required specificity and optimal amplification properties. See, e.g., Oligo version 5.0 (National Biosciences). Typically each gene fragment on the microarray will be between about 50 by and about 2000 bp, more typically between about 100 by and about 1000 bp, and usually between about 300 by and about 800 by in length.

[0074] Nucleic acid amplification methods are well known and are described, for example, in Innis et al., eds., 1990, PCR Protocols: A Guide to Methods and Applications, Academic Press Inc., San Diego, Calif., which is incorporated by reference in its entirety for all purposes. Computer controlled robotic systems are useful for isolating and amplifying nucleic acids.

[0075] An alternative means for generating the nucleic acid molecules for the microarray is by synthesis of synthetic polynucleotides or oligonucleotides, e.g., using N-phosphonate or phosphoramidite chemistries (e.g., Froehler et al., 1986, Nucleic Acid Res 14:5399-5407). Synthetic sequences are typically between about 15 and about 100 bases in length, such as between about 20 and about 50 bases.

[0076] In some embodiments, synthetic nucleic acids include non-natural bases, e.g., inosine. Where the particular base in a given sequence is unknown or is polymorphic, a universal base, such as inosine or 5-nitroindole, may be substituted. Additionally, it is possible to vary the charge on the phosphate backbone of the oligonucleotide, for example, by thiolation or methylation, or even to use a peptide rather than a phosphate backbone. The making of such modifications is within the skill of one trained in the art.

[0077] As noted above, nucleic acid analogues may be used as binding sites for hybridization. An example of a suitable nucleic acid analogue is peptide nucleic acid (see, e.g., Egholm et al., 1993, Nature 365:566-568; see also U.S. Pat. No. 5,539,083).

[0078] In another embodiment, the binding (hybridization) sites are made from plasmid or phage clones of genes, cDNAs (e.g., expressed sequence tags), or inserts therefrom (Nguyen et al., 1995, Genomics 29:207-209). In yet another embodiment, the polynucleotide of the binding sites is RNA.

[0079] C. Attaching nucleic acids to the solid support. The nucleic acids, or analogues, are attached to a solid support, which may be made, for example, from glass, silicon, plastic (e.g., polypropylene, nylon, polyester), polyacrylamide, nitrocellulose, cellulose acetate or other materials. In general, non-porous supports, and glass in particular, are preferred. The solid support may also be treated in such a way as to enhance binding of oligonucleotides thereto, or to reduce non-specific binding of unwanted substances thereto. For example, a glass support may be treated with polylysine or silane to facilitate attachment of oligonucleotides to the slide.

[0080] Methods of immobilizing DNA on the solid support may include direct touch, micropipetting (see, e.g., Yershov et al., 1996, Proc. Natl. Acad. Sci. USA 93:4913-4918), or the use of controlled electric fields to direct a given oligonucleotide to a specific spot in the array. Oligonucleotides are typically immobilized at a density of 100 to 10,000 oligonucleotides per cm², such as at a density of about 1000 oligonucleotides per cm².

[0081] A method for attaching the nucleic acids to a surface is by printing on glass plates, as is described generally by Schena et al., 1995, Science 270:467-470. This method is especially useful for preparing microarrays of cDNA. (See also DeRisi et al., 1996, Nature Genetics 14:457-460; Shalon et al., 1996, Genome Res. 6:639-645; and Schena et al., 1996, Proc. Natl. Acad. Sci. USA 93:10614-19.)

[0082] In an alternative to immobilizing pre-fabricated oligonucleotides onto a solid support, it is possible to synthesize oligonucleotides directly on the support (see, e.g., Maskos et al., 1993, Nucl. Acids Res. 21:2269-70; Lipshutz et al., 1999, Nat. Genet. 21(1 Suppl):20-4). Methods of synthesizing oligonucleotides directly on a solid support include photolithography (see McGall et al., 1996, Proc. Natl. Acad. Sci. USA 93:13555-60) and piezoelectric printing (Lipshutz et al., 1999, Nat. Genet. 21(1 Suppl):20-4).

[0083] A high-density oligonucleotide array may be employed. Techniques are known for producing arrays containing thousands of oligonucleotides complementary to defined sequences, at defined locations on a surface using photolithographic techniques for synthesis in situ (see Pease et al., 1994, Proc. Natl. Acad. Sci. USA 91:5022-5026; Lockhart et al., 1996, Nature Biotechnol. 14:1675-80) or other methods for rapid synthesis and deposition of defined oligonucleotides (Lipshutz et al., 1999, Nat. Genet. 21(1 Suppl):20-4).

[0084] In some embodiments, microarrays are manufactured by means of an ink jet printing device for oligonucleotide synthesis, e.g., using the methods and systems described by Blanchard in International Patent Publication No. WO 98/41531, published Sep. 24, 1998; Blanchard et al., 1996, Biosensors and Bioeletronics 11:687-690; Blanchard, 1998, in Synthetic DNA Arrays in Genetic Engineering, Vol. 20, J. K. Setlow (ed.), Plenum Press, New York at pages 111-123; U.S. Pat. No. 6,028,189 to Blanchard. Specifically, the oligonucleotide probes in such microarrays are preferably synthesized in arrays, e.g., on a glass slide, by serially depositing individual nucleotide bases in “microdroplets” of a high surface tension solvent such as propylene carbonate. The microdroplets have small volumes (e.g., 100 pL or less, more preferably 50 pL or less) and are separated from each other on the microarray (e.g., by hydrophobic domains) to form circular surface tension wells which define the locations of the array elements (i.e., the different probes).

[0085] Other methods for making microarrays, e.g., by masking (Maskos and Southern, 1992, Nuc. Acids Res. 20:1679-1684), may also be used. In principle, any type of array, for example dot blots on a nylon hybridization membrane (see Sambrook et al., 1989, Molecular Cloning—A Laboratory Manual (2nd ed.), Vols. 1-3, Cold Spring Harbor Laboratory, Cold Spring Harbor, N.Y.), could be used, although, as will be recognized by those of skill in the art, very small arrays are typically preferred because hybridization volumes will be smaller.

[0086] D. Signal detection and data analysis. When fluorescently labeled probes are used, the fluorescence emissions at each site of an array can be detected by scanning confocal laser microscopy. In one embodiment, a separate scan, using the appropriate excitation line, is carried out for each of the two fluorophores used. Alternatively, a laser can be used that allows simultaneous specimen illumination at wavelengths specific to the two fluorophores and emissions from the two fluorophores can be analyzed simultaneously (see Shalon et al., 1996, Genome Research 6:639-645, which is incorporated by reference in its entirety for all purposes). In one embodiment, the arrays are scanned with a laser fluorescent scanner with a computer controlled X-Y stage and a microscope objective. Sequential excitation of the two fluorophores is achieved with a multi-line, mixed gas laser and the emitted light is split by wavelength and detected with two photomultiplier tubes. Fluorescence laser scanning devices are described in Shalon et al., 1996, Genome Res. 6:639-645 and in other references cited herein. Alternatively, the fiber-optic bundle described by Ferguson et al., 1996, Nature Biotechnol. 14:1681-1684, may be used to monitor mRNA abundance levels at a large number of sites simultaneously.

[0087] Signals are recorded and may be analyzed by computer, e.g., using a 12 bit analog to digital board. In some embodiments the scanned image is de-speckled using a graphics program (e.g., Hijaak Graphics Suite) and then analyzed using an image gridding program that creates a spreadsheet of the average hybridization at each wavelength at each site. If necessary, an experimentally determined correction for “cross talk” (or overlap) between the channels for the two fluors may be made. For any particular hybridization site on the transcript array, a ratio of the emission of the two fluorophores can be calculated. The ratio is independent of the absolute expression level of the cognate gene, but is useful for genes whose expression is significantly modulated by drug administration.

[0088] The relative abundance of an mRNA in two biological samples is scored as a perturbation and its magnitude determined (i.e., the abundance is different in the two sources of mRNA tested), or as not perturbed (i.e., the relative abundance is the same). Preferably, in addition to identifying a perturbation as positive or negative, it is advantageous to determine the magnitude of the perturbation. This can be carried out, as noted above, by calculating the ratio of the emission of the two fluorophores used for differential labeling, or by analogous methods that will be readily apparent to those of skill in the art.

[0089] By way of example, two samples, each labeled with a different fluor, are hybridized simultaneously to permit differential expression measurements. If neither sample hybridizes to a given spot in the array, no fluorescence will be seen. If only one hybridizes to a given spot, the color of the resulting fluorescence will correspond to that of the fluor used to label the hybridizing sample (for example, green if the sample was labeled with Cy3, or red, if the sample was labeled with Cy5). If both samples hybridize to the same spot, an intermediate color is produced (for example, yellow if the samples were labeled with fluorescein and rhodamine). Then, applying methods of pattern recognition and data analysis known in the art, it is possible to quantify differences in gene expression between the samples. Methods of pattern recognition and data analysis are described in e.g., International Publication WO 00/24936, which is incorporated by reference herein.

### IV. DETECTING GENE EXPRESSION BY MEASURING EXPRESSION OF A POPULATION OF PROTEINS

[0090] The magnitude of expression of a plurality of genes can be measured, for example, by measuring the magnitude of expression of proteins encoded by the genes.

[0091] Any useful method for measuring protein expression patterns can be used. Typically all, or substantially all, proteins are extracted from a living thing, or a portion thereof, e.g., cells. The living thing is typically treated to disrupt cells, for example by homogenizing the cellular material in a blender, or by grinding (in the presence of acid-washed, siliconized, sand if desired) the cellular material with a mortar and pestle, or by subjecting the cellular material to osmotic stress that lyses the cells. Cell disruption may be carried out in the presence of a buffer that maintains the released contents of the disrupted cells at a desired pH, such as the physiological pH of the cells. The buffer may optionally contain inhibitors of endogenous proteases. Physical disruption of the cells can be conducted in the presence of chemical agents (e.g., detergents) that promote the release of proteins.

[0092] The cellular material may be treated in a manner that does not disrupt a significant proportion of cells, but which removes proteins from the surface of the cellular material, and/or from the interstices between cells. For example, cellular material can be soaked in a liquid buffer, or, in the case of plant material, can be subjected to a vacuum, in order to remove proteins located in the intercellular spaces and/or in the plant cell wall. If the cellular material is a microorganism, proteins can be extracted from the microorganism culture medium.

[0093] It may be desirable to include one or more protease inhibitors in the protein extraction buffer. Representative examples of protease inhibitors include: serine protease inhibitors (such as phenylmethylsulfonyl fluoride (PMSF), benzamide, benzamidine HCl, ε-Amino-n-caproic acid and aprotinin (Trasylol)); cysteine protease inhibitors, such as sodium p-hydroxymercuribenzoate; competitive protease inhibitors, such as antipain and leupeptin; covalent protease inhibitors, such as iodoacetate and N-ethylmaleimide; aspartate (acidic) protease inhibitors, such as pepstatin and diazoacetylnorleucine methyl ester (DAN); metalloprotease inhibitors, such as EGTA [ethylene glycol bis(β-aminoethyl ether) N,N,N′,N′-tetraacetic acid], and the chelator 1,10-phenanthroline.

[0094] The mixture of released proteins may, or may not, be treated to completely or partially purify some of the proteins for further analysis, and/or to remove non-protein contaminants (e.g., carbohydrates and lipids). In some embodiments, the complete mixture of released proteins is analyzed to determine the amount and/or identity of some or all of the proteins. For example, the protein mixture may be applied to a substrate bearing antibody molecules that specifically bind to one or more proteins in the mixture. The unbound proteins are removed (e.g., washed away with a buffer solution), and the amount of bound protein(s) is measured. Representative techniques for measuring the amount of protein using antibodies are described in Harlow and Lane, 1988, Antibodies: A Laboratory Manual, Cold Spring Harbor, N.Y., and include such techniques as the ELISA assay. Moreover, protein microarrays can be used to simultaneously measure the amount of a multiplicity of proteins. A surface of the microarray bears protein binding agents, such as monoclonal antibodies specific to a plurality of protein species. Preferably, antibodies are present for a substantial fraction of the encoded proteins, or at least for those proteins whose amount is to be measured. Methods for making monoclonal antibodies are well known (see, e.g., Harlow and Lane, 1988, Antibodies: A Laboratory Manual, Cold Spring Harbor, N.Y.). Protein binding agents are not restricted to monoclonal antibodies, and can be, for example, scFv/Fab diabodies, affibodies, and aptamers. Protein microarrays are generally described by Templin et al., 2002, Trends Biotechnol. 20:160-166. Representative examples of protein microarrays are described by Zhu et al., 2001, Science 293:2102-2105; and MacBeath and Schreiber, 2000, Science 289:1760-1763.

[0095] In some embodiments, the released protein is treated to completely or partially purify some of the proteins for further analysis, and/or to remove non-protein contaminants. Any useful purification technique, or combination of techniques, can be used. For example, a solution containing extracted proteins can be treated to selectively precipitate certain proteins, such as by dissolving ammonium sulfate in the solution, or by adding trichloroacetic acid. The precipitated material can be separated from the un-precipitated material, for example by centrifugation, or by filtration. The precipitated material can be further fractionated if so desired.

[0096] By way of example, a number of different neutral or slightly acidic salts have been used to solubilize, precipitate, or fractionate proteins in a differential manner. These include NaCl, Na₂SO₄, MgSO₄ and NH₄(SO₄)₂. Ammonium sulfate is a commonly used precipitant for salting proteins out of solution. The solution to be treated with ammonium sulfate may first be clarified by centrifugation. The solution should be in a buffer at neutral pH unless there is a reason to conduct the precipitation at another pH; in most cases the buffer will have ionic strength close to physiological. Precipitation is usually performed at 0-4° C. (to reduce the rate of proteolysis caused by proteases in the solution), and all solutions should be pre-cooled to that temperature range.

[0097] Representative examples of other art-recognized techniques for purifying, or partially purifying, proteins from a living thing are exclusion chromatography, ion-exchange chromatography, hydrophobic interaction chromatography, reversed-phase chromatography and immobilized metal affinity chromatography.

[0098] Hydrophobic interaction chromatography and reversed-phase chromatography are two separation methods based on the interactions between the hydrophobic moieties of a sample and an insoluble, immobilized hydrophobic group present on the chromatography matrix. In hydrophobic interaction chromatography the matrix is hydrophilic and is substituted with short-chain phenyl or octyl nonpolar groups. The mobile phase is usually an aqueous salt solution. In reversed phase chromatography the matrix is silica that has been substituted with longer n-alkyl chains, usually C₈ (octylsilyl) or C₁₈ (octadecylsilyl). The matrix is less polar than the mobile phase. The mobile phase is usually a mixture of water and a less polar organic modifier.

[0099] Separations on hydrophobic interaction chromatography matrices are usually done in aqueous salt solutions, which generally are non-denaturing conditions. Samples are loaded onto the matrix in a high-salt buffer and elution is by a descending salt gradient. Separations on reversed-phase media are usually done in mixtures of aqueous and organic solvents, which are often denaturing conditions. In the case of protein purification, hydrophobic interaction chromatography depends on surface hydrophobic groups and is usually carried out under conditions which maintain the integrity of the protein molecule. Reversed-phase chromatography depends on the native hydrophobicity of the protein and is carried out under conditions which expose nearly all hydrophobic groups to the matrix, i.e., denaturing conditions.

[0100] Ion-exchange chromatography is designed specifically for the separation of ionic or ionizable compounds. The stationary phase (column matrix material) carries ionizable functional groups, fixed by chemical bonding to the stationary phase. These fixed charges carry a counter-ion of opposite sign. This counter-ion is not fixed and can be displaced. Ion-exchange chromatography is named on the basis of the sign of the displaceable charges. Thus, in anion ion-exchange chromatography the fixed charges are positive and in cation ion-exchange chromatography the fixed charges are negative.

[0101] Retention of a molecule on an ion-exchange chromatography column involves an electrostatic interaction between the fixed charges and those of the molecule, binding involves replacement of the non-fixed ions by the molecule. Elution, in turn, involves displacement of the molecule from the fixed charges by a new counter-ion with a greater affinity for the fixed charges than the molecule, and which then becomes the new, non-fixed ion.

[0102] The ability of counter-ions (salts) to displace molecules bound to fixed charges is a function of the difference in affinities between the fixed charges and the non-fixed charges of both the molecule and the salt. Affinities in turn are affected by several variables, including the magnitude of the net charge of the molecule and the concentration and type of salt used for displacement.

[0103] Solid-phase packings used in ion-exchange chromatography include cellulose, dextrans, agarose, and polystyrene. The exchange groups used include DEAE (diethylaminoethyl), a weak base, that will have a net positive charge when ionized and will therefore bind and exchange anions; and CM (carboxymethyl), a weak acid, with a negative charge when ionized that will bind and exchange cations. Another form of weak anion exchanger contains the PEI (polyethyleneimine) functional group. This material, most usually found on thin layer sheets, is useful for binding proteins at pH values above their pI. The polystyrene matrix can be obtained with quaternary ammonium functional groups for strong base anion exchange or with sulfonic acid functional groups for strong acid cation exchange. Intermediate and weak ion-exchange materials are also available. Ion-exchange chromatography need not be performed using a column, and can be performed as batch ion-exchange chromatography with the slurry of the stationary phase in a vessel such as a beaker.

[0104] Gel filtration is performed using porous beads as the chromatographic support. A column constructed from such beads will have two measurable liquid volumes, the external volume, consisting of the liquid between the beads, and the internal volume, consisting of the liquid within the pores of the beads. Large molecules will equilibrate only with the external volume while small molecules will equilibrate with both the external and internal volumes. A mixture of molecules (such as proteins) is applied in a discrete volume or zone at the top of a gel filtration column and allowed to percolate through the column. The large molecules are excluded from the internal volume and therefore emerge first from the column while the smaller molecules, which can access the internal volume, emerge later. The volume of a conventional matrix used for protein purification is typically 30 to 100 times the volume of the sample to be fractionated. The absorbance of the column effluent can be continuously monitored at a desired wavelength using a flow monitor.

[0105] A technique that can be applied to the purification of proteins is High Performance Liquid Chromatography (HPLC). HPLC is an advancement in both the operational theory and fabrication of traditional chromatographic systems. HPLC systems for the separation of biological macromolecules vary from the traditional column chromatographic systems in three ways; (1) the column packing materials are of much greater mechanical strength, (2) the particle size of the column packing materials has been decreased 5- to 10-fold to enhance adsorption-desorption kinetics and diminish band spreading, and (3) the columns are operated at 10-60 times higher mobile-phase velocity. Thus, by way of non-limiting example, HPLC can utilize exclusion chromatography, ion-exchange chromatography, hydrophobic interaction chromatography, reversed-phase chromatography and immobilized metal affinity chromatography.

[0106] An exemplary technique that is useful for measuring the amounts of individual proteins in a mixture of proteins is two dimensional gel electrophoresis. This technique typically involves isoelectric focusing of a protein mixture along a first dimension, followed by SDS-PAGE of the focused proteins along a second dimension (see, e.g., Hames et al., 1990, Gel Electrophoresis of Proteins: A Practical Approach, IRL Press, New York; Shevchenko et al., 1996, Proc. Nat'l Acad. Sci. U.S.A. 93:1440-1445; Sagliocco et al., 1996, Yeast 12:1519-1533; Lander, 1996, Science 274:536-539; and Beaumont et al., Life Science News, 2001, 7, Amersham Pharmacia Biotech. The resulting series of protein “spots” on the second dimension SDS-PAGE gel can be measured to reveal the amount of one or more specific proteins in the mixture. The identity of the measured proteins may, or may not, be known; it is only necessary to be able to identify and measure specific protein “spots” on the second dimension gel. Numerous techniques are available to measure the amount of protein in a “spot” on the second dimension gel. For example, the gel can be stained with a reagent that binds to proteins and yields a visible protein “spot” (e.g., Coomassie blue dye, or staining with silver nitrate), and the density of the stained spot can be measured. Again by way of example, all, or most, proteins in a mixture can be measured with a fluorescent reagent before electrophoretic separation, and the amount of fluorescence in some, or all, of the resolved protein “spots” can be measured (see, e.g., Beaumont et al., Life Science News, 7, 2001, Amersham Pharmacia Biotech).

[0107] Again by way of example, any HPLC technique (e.g., exclusion chromatography, ion-exchange chromatography, hydrophobic interaction chromatography, reversed-phase chromatography and immobilized metal affinity chromatography) can be used to separate proteins in a mixture, and the separated proteins can thereafter be directed to a detector (e.g., spectrophotometer) that detects and measures the amount of individual proteins.

[0108] In some embodiments of the invention it is desirable to both identify and measure the amount of specific proteins. A technique that is useful in these embodiments of the invention is mass spectrometry, in particular the techniques of electrospray ionization mass spectrometry (ESI-MS) and matrix-assisted laser desorption/ionization mass spectrometry (MALDI-MS), although it is understood that mass spectrometry can be used only to measure the amounts of proteins without also identifying (by function and/or sequence) the proteins. These techniques overcame the problem of generating ions from large, non-volatile, analytes, such as proteins, without significant analyte fragmentation (see, e.g., Aebersold and Goodlett, 2001, Chem. Rev. 102: 269-296).

[0109] Thus, for example, proteins can be extracted from cells of a living thing and individual proteins purified therefrom using, for example, any of the art-recognized purification techniques described herein (e.g., HPLC). The purified proteins are subjected to enzymatic degradation using a protein-degrading agent (e.g., an enzyme, such as trypsin) that cleaves proteins at specific amino acid sequences. The resulting protein fragments are subjected to mass spectrometry. If the sequence of the complete genome (or at least the sequence of part of the genome) of the living thing from which the proteins were isolated is known, then computer algorithms are available that can compare the observed protein fragments to the protein fragments that are predicted to exist by cleaving the proteins encoded by the genome with the agent used to cleave the extracted proteins. Thus, the identity, and the amount, of the proteins from which the observed fragments are derived can be determined.

[0110] Again by way of example, the use of isotope-coded affinity tags in conjunction with mass spectrometry is a technique that is adapted to permit comparison of the identities and amounts of proteins expressed in different samples of the same type of living thing subjected to different treatments (e.g., the same type of living tissue cultured, in vitro, in the presence or absence of a candidate drug) (see, e.g., Gygi et al., 1999, Nat. Biotechnol. 17:994-999). In an exemplary embodiment of this method, two different samples of the same type of living thing are subjected to two different treatments (treatment 1 and treatment 2). Proteins are extracted from the treated living things and are labeled (via cysteine residues) with an ICAT reagent that includes (1) a thiol-specific reactive group, (2) a linker that can include eight deuteriums (yielding a heavy ICAT reagent) or no deuteriums (yielding a light ICAT reagent), and (3) a biotin molecule. Thus, for example, the proteins from treatment 1 may be labeled with the heavy ICAT reagent, and proteins from treatment 2 may be labeled with the light ICAT reagent. The labeled proteins from treatment 1 and treatment 2 are combined and enzymatically cleaved to generate peptide fragments. The tagged (cysteine-containing) fragments are isolated by avidin affinity chromatography (that binds the biotin moiety of the ICAT reagent). The isolated peptides are then separated by mass spectrometry. The quantity and identity of the peptides (and the proteins from which they are derived) may be determined. The method is also applicable to proteins that do not include cysteines by using ICAT reagents that label other amino acids.

### V. ESTIMATING HSD1 ACTIVITY

[0111] HSD1 encodes 11-β-Hydroxysteroid Dehydrogenase Type I, a component of glucose and lipid metabolism, catalyzing the conversion of inactive cortisone to active cortisol. Some embodiments of the present invention provide methods to estimate the activity of HSD1 based upon the level of expression of genes that are differentially expressed in a cell in response to cortisone. Marker genes identified as being differentially expressed in cells in response to cortisone may be used in a variety of nucleic acid detection assays to detect or quantify the expression level of a gene or multiple genes in a given sample. For example, traditional Northern blotting, nuclease protection, RT-PCR, differential display methods, and microarray may be used for detecting gene expression levels. Alternatively, protein detection methods such as 2D gel electrophoresis, surface-enhanced laser desorption/ionization time-of-flight (SELDI-TOF) followed by affinity chromatography, isotope-coded affinity tags (ICAT) in conjunction with mass spectrometry, may also be used for detecting gene expression levels. It is to be understood that alternative assay formats, other than the methodologies exemplified herein, may be used to estimate the activity of HSD1 based upon the expression of a plurality of gene markers identified in Table 2. Alternatively, HSD1 activity is estimated based upon the expression of a plurality of gene markers identified in Table 8.

[0112] As described in more detail in Example 2, genome-wide gene expression profiling was used to design a gene expression-based assay for measuring HSD1 activity to identify a general cortisone-induced gene expression signature in cultured HepG2 cells over-expressing HSD1. Cortisone is the substrate for HSD1 and the precursor to active cortisol. Some embodiments of the inventive methods are derived from a hypothesis that the cortisone response signature would be altered by active HSD1 inhibitors, but not by compounds that do not significantly alter the activity HSD1. Experimental validation of this hypothesis (see Example 2) confirms that it is possible to determine whether an agent inhibits HSD1 activity and to rank order HSD1 inhibitor agents based upon the degree to which the a plurality of genes selected from the cortisone response signature gene list in Table 2 is changed by each HSD1 inhibitory agent.

[0113] Based on the data described herein, a set of genes were identified, collectively referred to herein as a cortisone response signature (alternatively referred to as a cortisone response gene set), that are regulated in vitro in HepG2 cells over-expressing HSD1 in response to exposure to cortisone. Table 8 provides a list genes selected from Table 2 that may be used in the practice of some embodiments of the invention and represents an alternative cortisone response gene set.

[0114] In one embodiment of the invention, a method is provided for identifying a one or more genes useful for estimating HSD1 activity in a human subject. The method comprises: contacting a first sample of cells from a human hepatoma cell line with HSD1, wherein the cell line expresses HSD1; measuring an expression level for each of a plurality of genes of the cell line in the first sample; comparing the measured expression level of each of the plurality of genes in the first cell sample to a second expression level of each of the plurality of genes in a second sample of the cell line not contacted with cortisone; and identifying one or more genes in the plurality of genes that exhibit a statistically significant change in gene expression level between the first sample and the second sample, wherein the identified one or more genes are useful for estimating HSD1 activity in the human subject. In some embodiments the change in gene expression level is an at least 1.5-fold change between the first and second cell samples with a p-value for the change of less than or equal to 0.01. The plurality of genes whose expression is measured may be at least 10 genes, 50 genes, 100 genes, 500 genes, 1,000 genes, or 10,000 genes in the human genome. In one embodiment, the cell line is HepG2 modified to over-express HSD1. Optionally, both of the cell samples are contacted with forsoklin.

[0115] In another embodiment of the invention, a method of identifying an agent that modifies HSD1 activity is provided. The method comprises contacting an agent with a first cell sample of an HepG2 cell line, wherein the cell line over-expresses HSD1; and determining a change in HSD1 activity compared to a second sample of the cell line not contacted with the agent. HSD1 activity may be determined using an HSD1 enzyme assay or a gene expression measurement assay. As described previously, cell lines that over-express HSD1 may be produced in a variety of ways using a variety of different HSD1 gene sequences. In some embodiments the over-expressed HSD1 comprises a sequence encoding a polypeptide having at least 95% sequence identity to SEQ ID NO: 2. In some embodiments of the invention, HSD1 is produced in the HepG2 hepatoma cell line at least two-fold higher than expression of HSD1 in a HepG2 hepatoma cell line that does not over-express HSD1. Alternatively, HSD1 is expressed at least five-fold or at least ten-fold higher in the HepG2 hepatoma cell line than expression of HSD1 in a HepG2 hepatoma cell line that does not over-express HSD1. Optionally, the method may be practiced using samples of the HepG2 hepatoma cell line over-expressing HSD1 that are contacted with forskolin. Alternatively, or additionally, the samples of the HepG2 hepatoma cell line over-expressing HSD1 may be contacted with cortisone.

[0116] In another embodiment of the invention, changes in expression levels of cortisone response signature genes, used as a surrogate for HSD1 activity, may be measured in subjects other than HepG2 cells that over-express HSD1. One such exemplary method of estimating HSD1 activity in a subject comprising administering cortisone to a subject; obtaining an expression level for each of a plurality of genes in a test sample taken from the subject, wherein the subject has detectable HSD1 activity, and the plurality of genes correspond to at least three markers listed in Table 2; and then comparing each measured expression level for each of the plurality of genes in the test sample to a second set of gene expression levels for each of the plurality of genes measured in a control sample, wherein the control sample has not been contacted with cortisone. The difference in expression levels of the plurality of genes between the test sample and the control sample provides an estimate of HSD1 activity in the subject. In some embodiments the subject comprises a HepG2 hepatoma cell line, wherein the cell line over-expresses HSD1 at a level that is detectably higher than the level of HSD1 in HepG2 hepatoma cells that do not over-express HSD1.

[0117] The amount of cortisone to be added to a subject expressing HSD1 needs to be sufficient to allow the newly generated active glucocorticoid cortisol to activate the glucocorticoid receptor. The necessary amount of cortisol needed for glucocorticoid receptor activation will depend on factors such as gene sequence, the cell line, duration of incubation, HSD1 activity. Cortisone titration experiments may be performed to determine its saturation level or level at which HSD1 activity is maximized. Furthermore, other glucocorticoid precursors may be used in place of cortisone in the methods described herein, providing that the glucocorticoid precursors can be metabolized enzymatically by HSD1 to generate active glucocorticoid compounds. Examples of such glucocorticoid precursors include 11-dehydrocorticosterone, prednisone, or other pro-drugs, such as acetate.

[0118] In some embodiment of the invention, measuring HSD1 activity to identify a general cortisone-induced gene expression signature in cultured HepG2 cells over-expressing HSD1 is performed in the presence of forskolin. Forskolin, an activator of adenylyl cyclase, has been found to potentiate the glucocorticoid response in HepG2 cells (Ge et al., 2003, Endocrine Society Meeting, Poster P2-128).

[0119] As shown in the examples, active HSD1 inhibitor agents significantly alter the expression levels of the cortisone response signature genes whereas agents that do not inhibit HSD1 activity do not induce such changes in expression of genes in the cortisone response gene set. The identification and use of the cortisone response gene sets, as disclosed herein, provides an assay to monitor and classify cellular responses following exposure to agents that modulate HSD1 activity.

[0120] In some embodiments, polynucleotides that are complementary and hybridizable to the genes in the cortisone response signature listed in Table 2 and Table 8 are used to estimate HSD1 activity using the methods described in the examples. Persons of skill in the art will recognize that there are numerous examples of polynucleotides complementary and hybridizable to the cortisone response signature genes that may be used to measure gene expression levels, including oligonucleotide probes, RT-PCR primers.

[0121] Estimating HSD1 activity using cortisone response signature gene expression is useful, for example, in gene expression assays to diagnose and monitor treatment of diseases related to glucocorticoid metabolism and to identify and classify agents affecting HSD1 activity. Measurement of cortisone response signature gene expression can also be used to identify and categorize glucocorticoid disease subtypes not heretofore appreciated using conventional diagnostic tests. In some embodiments of the invention, expression of the cortisone response signature genes is measured using any of a variety of methods well known in the art, such as Northern blots, microarrays, and RT-PCR, and the like. For example, Table 8, sets forth primer sequences for a subset of the cortisone response genes listed in Table 2 that may be used in RT-PCR reactions to measure a gene expression level for each listed transcript. Cortisone response signature gene expression may also be monitored by other means, such as detecting their proteins or metabolic products.

[0122] One aspect of the present invention provides a method of estimating HSD1 activity in a subject. This is useful, for example, to detect changes in HSD1 activity in a subject in response to a disease state or treatment of a disease. The method comprises: administering cortisone to a subject; obtaining an expression level for each of a plurality of genes in a test sample taken from said subject, wherein said subject has detectable HSD1 activity, said plurality of genes corresponding to at least three markers listed in Table 2 or 8; and comparing each said measured expression level for said plurality of genes in said test sample to a second set of gene expression levels for each of said plurality of genes measured in a control sample, said control sample obtained from said subject not contacted with cortisone, wherein a difference in expression levels of said plurality of genes between said test sample and said control sample provides an estimate of HSD1 activity in said subject.

[0123] In another embodiment, a method is provided for estimating HSD1 activity in an HepG2 cell line that over-expresses HSD1. The method comprises: administering cortisone to a subject, said HepG2 cell line that over-expresses HSD1; obtaining an expression level for each of a plurality of genes in a test sample taken from said subject, wherein said subject has detectable HSD1 activity, said plurality of genes corresponding to at least three markers listed in Table 2 or 8; and comparing each said measured expression level for said plurality of genes in said test sample to a second set of gene expression levels for each of said plurality of genes measured in a control sample, said control sample obtained from said subject not contacted with cortisone, wherein a difference in expression levels of said plurality of genes between said test sample and said control sample provides an estimate of HSD1 activity in said subject.

[0124] Alternatively, the method of estimating HSD1 activity in a subject as described above may be used to identify a compound that modifies HSD1 activity, wherein said compound modifies the expression of one or more genes in said cortisone response signature in a sample from said cell line contacted with the compound in the presence of cortisone relative to the expression of one or more genes in said cortisone response signature in an analogous sample from said cell line not contacted with said compound in the presence of cortisone. A compound which modifies expression of one or more genes in said cortisone response signature compared to a control sample is said to modify HSD1 activity. In other embodiments of the invention, said cortisone response signature comprises at least 3 or more, at least 4 or more, and, at least 5 or more sequences selected from Table 2. In some embodiments of the invention, gene expression levels of the cortisone response signature are determined using a method selected from the group consisting of microarray, RT-PCR, Northern blot, 2D gel electrophoresis, SELDI-TOF, and ICAT.

[0125] The invention also provides for a method of classifying compounds that modify HSD1 activity comprising the steps of: a) contacting subject with a compound in the presence of cortisone; b) measuring gene expression level in a sample of mRNA, nucleic acid, or protein derived therefrom said subject, wherein said gene comprises a nucleotide sequence selected from cortisone response signature presented in Table 2 or Table 8; and c) comparing said measured expression level of said gene to the expression level of said gene in an analogous sample from said subject not contacted with said compound in the presence of cortisone, wherein the change in cortisone response signature gene expression level is used to rank order compounds that modify HSD1 activity. The above described method can also be performed wherein said subject comprises a HepG2 cell line that over-expresses HSD1.

### VI. IDENTIFYING OFF-TARGET ACTIVITY

[0126] Based on the data described herein, embodiments of the invention provide a method of identifying an off-target gene signature cells in the presence of an HSD1 compound, independent of cortisone exposure or HSD1 activity. In one embodiment, an off-target gene signature is detected in HepG2 cells over-expressing HSD1 in the presence of an HSD1 inhibitor compound and forskolin, independent of cortisone exposure. Changes in expression levels of the gene signature in response to the compound, independent of cortisone exposure, are indicators of off-target activity. Identification of the off-target signatures disclosed herein, the regulation of which is indicative of an HSD1 inhibitor compound's off-target activity, provides an assay to monitor and classify off-target responses following exposure to agents that modulate HSD1 activity.

[0127] Another embodiment provides methods for detection of off-target HSD1 compound activity. Off-target HSD1 activity is defined as changes in expression of genes that are induced independent of cortisone or HSD1 activity in the presence of an HSD1 compound. Thus, one embodiment provides a method of identifying one or more genes of a cell line as useful for estimating HSD1 off-target activity of an HSD1-agent. The method comprises contacting an HSD1-agent with a first sample of cells from a cell line, wherein said cell line does not express a detectable level of HSD1 activity, or, is not contacted with cortisone. Gene expression levels are then measured for a plurality of genes in the first cell sample and compared to the expression level of the same plurality of genes in a second sample cells of the cell line not contacted with the HSD1-agent. One or more genes are then identified in the plurality of measured genes which exhibit a statistically significant change in gene expression level between the first cell sample and the second cell sample, wherein the identified one or more genes are useful for estimating off-target activity of an HSD1-agent. In one embodiment the measured change in gene expression level is an at least 1.5-fold change with a p-value for the change of less than or equal to 0.01. In other embodiments, the plurality of genes for which gene expression levels are measured is at least 10 genes, 50 genes, 100 genes, 500 genes, 1000 genes, or at least 10,000 genes. In another embodiment, the cell line is HepG2. Alternatively, the cell line is a HepG2 cell line modified to over-express HSD1, in which case the cell samples are not contacted with cortisone. In other embodiments, the number of genes identified as showing a change in gene expression provides an estimate of the HSD1 off-target activity of the HSD1-agent. In this way embodiments of the inventive method can be used to compare two or more HSD1 inhibitor compounds to each other to determine which compound exhibits more or less HSD1 off-target activity.

[0128] In another embodiment of the invention, an off-target signature may be obtained in vitro in cell lines other than HepG2 that express HSD1 in the presence of a compound, independent of cortisone. In an alternative embodiment of the invention, an off-target signature may also be obtained in vitro in cell lines which do not express HSD1 in the presence of a compound. Changes in expression levels of the gene signature in response to the compound, independent of activation of the glucocorticoid receptor pathway, are indicators of off-target activity.

[0129] More specifically, an active HSD1 inhibitor agent, (3-(2-chlorophenyl)-4-methyl-5-(4-pentylbicyclo[2.2.2]oct-1-yl)-4H-1,2,4-triazole (described in U.S. Pat. No. 6,849,636 and WO2004058730A2)), that failed to achieve significant efficacy in vivo exhibited off-target activity in a HepG2 cell line that over-expresses HSD1. The presence of the off-target signature (see Table 6), as measured in a series of microarray based measurements of gene expression, was independent of cortisone treatment, suggesting that the off-target activity was occurring via a glucocorticoid independent pathway. This off-target gene signature was not detected in other active HSD1 inhibitor compounds with in vivo efficacy. Monitoring for the off-target signature identified by 3-(2-chlorophenyl)-4-methyl-5-(4-pentylbicyclo[2.2.2]oct-1-yl)-4H-1,2,4-triazole in the HepG2 cells over-expressing HSD1 can improve characterization and selection of candidate HSD1 compounds prior to in vivo efficacy testing.

[0130] The genes identified as being differentially expressed in cells in response to a compound and independent of cortisone may be used in a variety of nucleic acid detection assays to detect or quantify the expression level of a gene or multiple genes in a given sample. For example, traditional Northern blotting, nuclease protection, RT-PCR, differential display methods, and microarray may be used for detecting gene expression levels. Alternatively, protein detection methods such as 2D gel electrophoresis, surface-enhanced laser desorption/ionization time-of-flight (SELDI-TOF) followed by affinity chromatography, isotope-coded affinity tags (ICAT) in conjunction with mass spectrometry, may also be used for detecting gene expression levels. It is to be understood that alternative assay formats, other than the methodologies exemplified herein, may be used to estimate a compound's off-target activity based upon the expression of a plurality of genes listed in Table 6 or 9.

[0131] One aspect of the invention provides for a method of classifying compounds that modify HSD1 activity by monitoring off-target activity comprising: a) contacting a compound with a HepG2 cell line over-expressing HSD1; b) measuring gene expression level in a sample of mRNA, nucleic acid, or protein derived therefrom said cell line, wherein said gene comprises a nucleotide sequence selected from the off-target signature genes presented in Table 6 or Table 9; and c) comparing said measured expression level of said gene to the expression level of said gene in an analogous cell line not contacted with said compound; wherein a change in off-target gene expression is indicative of off-target activity.

### VII. REAL-TIME PCR TO SCREEN LARGE PANEL OF COMPOUNDS FOR MODULATION OF HSD1 ACTIVITY OR OFF-TARGET ACTIVITY

[0132] In practice, a gene expression-based pharmacodynamic assay based on a small number of genes can be performed with relatively little effort using existing quantitative real-time PCR technology familiar to clinical laboratories. Quantitative real-time PCR measures PCR product accumulation through a dual-labeled fluorigenic probe. A variety of normalization methods may be used, such as an internal competitor for each target sequence, a normalization gene contained within the sample, or a housekeeping gene. Sufficient RNA for real time PCR can be isolated from low milligram quantities from a subject. Quantitative thermal cyclers may now be used with microfluidics cards preloaded with reagents making routine clinical use of multigene expression-based assays a realistic goal.

[0133] The cortisone signature or off-target signature gene sets or a subset of genes selected from the cortisone or off-target gene sets, which are assayed according to the present invention are typically in the form of total RNA or mRNA or reverse transcribed total RNA or mRNA. General methods for total and mRNA extraction are well known in the art and are disclosed in standard textbooks of molecular biology, including Ausubel et al., Current Protocols of Molecular Biology, John Wiley and Sons (1997). RNA isolation can also be performed using purification kit, buffer set and protease from commercial manufacturers, such as Qiagen (Valencia, Calif.) and Ambion (Austin, Tex.), according to the manufacturer's instructions.

[0134] TAQman quantitative real-time PCR can be performed using commercially available PCR reagents (Applied Biosystems, Foster City, Calif.) and equipment, such as ABI Prism 7900HT Sequence Detection System (Applied Biosystems) according the manufacturer's instructions. The system consists of a thermocycler, laser, charge-coupled device (CCD), camera, and computer. The system amplifies samples in a 96-well or 384-well format on a thermocycler. During amplification, laser-induced fluorescent signal is collected in real-time through fiber-optics cables for all 96 wells, and detected at the CCD. The system includes software for running the instrument and for analyzing the data.

[0135] Based upon the cortisone response and off-target gene signatures identified in the present invention, a real-time PCR TAQman assay can be used to screen a large panel of compounds for inhibition of HSD1 activity (repression of the cortisone response signature) as well as for off-target activity. Oligonucleotide primer and probes that are complementary to or hybridize to the cortisone response were designed and are set forth in Tables 2 and 7. Oligonucleotide primer and probes that are complementary to or hybridize to the off-target signature genes were designed and are set forth in Tables 5 and 8. Of course, as would be apparent to a person of skill in the art, many other oligonucleotide primers and probe sequences could be selected and used in the practice of these methods based upon the transcript sequences set forth in the Sequence Listing as identified in Table 2 for the cortisone signature genes and in Table 6 for the off-target signature genes.

[0136] In an embodiment of the invention, the cortisone signature response genes selected for measurement of gene expression in a real-time PCR assay comprises: Homer-2, PGC, G6PC, TAT, and LIPG. Homer-2 refers to Homer homolog 2 protein. Homer-2 reference transcripts are represented by NM_{—}004839 which encodes NP_{—}004830 (transcript variant 1), NM_{—}199330 which encodes NP_{—}955362 (transcript variant 2), NM_{—}199331 which encodes NP_{—}955363 (transcript variant 3), and NM_{—}199332 which encodes NP_{—}955364 (transcript variant 4). Homer-2 nucleic acid sequences are provided by SEQ ID NO:s: 12, 13, 14, and 15. Homer-2 amino acid sequences are provided by SEQ ID NO:s: 16, 17, 18, and 19. PGC refers to progastricsin, also known as pepsinogen C. PGC reference transcript is represented by NM_{—}002630 which encodes NP_{—}002621. PGC nucleic acid sequence is provided by SEQ ID NO: 20. PGC amino acid sequence is provided by SEQ ID NO: 21. G6PC refers to glucose-6-phosphatase, catalytic. G6PC reference transcript is represented by NM_{—}000151 which encodes NP_{—}000142. G6PC nucleic acid sequence is provided by SEQ ID NO: 22. G6PC amino acid sequence is provided by SEQ ID NO: 23. TAT refers to tyrosine aminotransferase. TAT reference transcript is represented by NM_{—}000353 which encodes NP_{—}000344. TAT nucleic acid sequence is provided by SEQ ID NO: 24. TAT amino acid sequence is provided by SEQ ID NO: 25. LIPG refers to lipase, endothelial. LIPG reference transcript is represented by NM_{—}006033 which encodes NP_{—}006024. LIPG nucleic acid sequence is provided by SEQ ID NO: 26. LIPG amino acid sequence is provided by SEQ ID NO: 27.

[0137] In another embodiment of the invention, the off-target signature genes selected for measurement of gene expression in a real-time PCR assay comprises: DHCR7, SCD, ACLY, FBXO9, and HEY1. DHCR7 refers to 7-dehydrocholesterol reductase. DHCR7 reference transcript is represented by NM_{—}001360 which encodes NP_{—}001351. DHCR7 nucleic acid sequence is provided by SEQ ID NO: 28. DHCR7 amino acid sequence is provided by SEQ ID NO: 29. SCD refers to stearoyl-CoA desaturase, also known as delta-9-desaturase. SCD reference transcript is represented by NM_{—}005063 which encodes NP_{—}005054. SCD nucleic acid sequence is provided by SEQ ID NO: 30. SCD amino acid sequence is provided by SEQ ID NO: 31. ACLY refers to ATP citrate lyase. ACLY reference transcripts are represented by NM_{—}001096 which encodes NP_{—}001087 (transcript variant 1) and NM_{—}198830 which encodes NP_{—}942127 (transcript variant 2). ACLY nucleic acid sequences are provided by SEQ ID NOs: 32 and 33. ACLY amino acid sequences are provided by SEQ ID NOs: 34 and 35. FBXO9 refers to F-box protein 9. FBXO9 reference transcripts are represented by NM_{—}012347 which encodes NP_{—}036479 (transcript variant 1), NM_{—}033480 which encodes NP_{—}258441 (transcript variant 2), and NM_{—}033481 which encodes NP_{—}258442 (transcript variant 3). FBXO9 nucleic acid sequences are provided by SEQ ID NOs: 36, 37, and 38. FBXO9 amino acid sequences are provided by SEQ ID NOs: 39, 40, and 41. HEY1 refers to hairy/enhancer-of-split related with YRPW motif 1. HEY1 reference transcript is represented by NM_{—}012258 which encodes NP_{—}036390. HEY1 nucleic acid sequence is provided by SEQ ID NO: 42. HEY1 amino acid sequence is provided by SEQ ID NO: 43. It is to be understood that other assay formats, other than real-time PCR, may be used to estimate HSD1 activity and off-target activity based upon the expression of a plurality of genes identified in Table 2 or Table 6, respectively.

### EXAMPLES

[0138] Examples are provided below to further illustrate different features and advantages of the present invention. The examples also illustrate useful methodology for practicing the invention. These examples do not limit the claimed invention.

### Example 1

### Generation of HepG2 Cells Over-Expressing HSD1

[0139] HepG2 cells express low levels of endogenous HSD1 (Williams et al., 2000, J. Biol. Chem. 275:30232-30239; Parks et al., 1998, J Steroid Biochem Mol. Biol. 1998 67:341-346). HepG2 hepatoma cells (ATCC HB-8065; Knowles et al., 1980, Science 209:497-499) were transfected with cDNA encoding full-length human HSD1 (SEQ ID NO: 2), as described in more detail below, to obtain a modified HepG2 cell line that over-expresses HSD1.

[0140] A. PCR. The HSD1 cDNA sequence was cloned from human liver Quick-Clone cDNA (Clontech, Palo Alto, Calif.) using the polymerase chain reaction (PCR). For PCR, 0.5 μl (0.5 ng) cDNA was added to 41 μl of water, 5 μl of 10×NE Buffer for Vent polymerase (New England Biolabs, Beverly, Mass.), 1 μl of 10 mM dNTPs and 0.5 μl of Vent Polymerase (New England Biolabs, Beverly, Mass.). PCR was done in a Perkin-Elmer Cetus DNA Thermal Cycler using 1 μM each of the HSD1 “forward” and “reverse” primers for HSD1 (HSD1 forward primer 5′-CCT GTC GGA TGG CTT TTA TG-3′ (SEQ ID NO: 44); HSD1 reverse primer 5′-GCG GTG CAT GAC ATT CAT TA-3′ (SEQ ID NO: 45) in a total volume of 50 μl. Thirty cycles of amplification were performed using a 1 min denaturation at 94° C. followed by 1 min annealing at 55° C. and a 1 min synthesis at 72° C. The 30 cycles of PCR were followed by a 10 minute extension at 72° C. The 50 μl reaction was then chilled to 4° C. 10 μl of the resulting reaction product was run on a 1% Seakem Gold agarose (Cambrex) gel stained with 0.3 μg/ml ethidium bromide (Fisher Biotech, Fair Lawn, N.J.). Nucleic acid bands in the gel were visualized and photographed on a UV light box to determine if the PCR had yielded products of the expected size, in the case of the HSD1 mRNA, a product of about 1083 base pairs. The remainder of the 50 μl PCR reactions was purified using the Wizard PCR purification kit (Promega, Madison, Wis.) following the QIAquik PCR Purification Protocol provided with the kit. The purified PCR product was ligated into the pPCR-Script Amp vector and transformed into XL-1 Blue MRF' Kan using the PCR-Script Amp cloning kit from Stratagene (LaJolla, Calif.). Ampicillin-resistant clones were selected on LB agar plates containing 100 μg/ml ampicillin, 50 μg/ml IPTG and 40 μg/ml X-Gal.

[0141] B. Cloning and HepG2 transfection. About 4 μl of purified HSD1 PCR product from human liver cDNA were used in a ligation reaction using the reagents and instructions provided with the PCR-Script Amp cloning kit (Stratagene, LaJolla, Calif.). About 2 μl of the ligation reaction was used following the manufacturer's instructions to transform XL-1 Blue MRF' Kan electroporation-competent E. coli provided with the cloning kit. After the 1 hour recovery of the cells in SOC medium (provided with the PCR-Script Amp cloning kit), 200 μl of the mixture was plated on LB medium agar plates (Sambrook, et al., in Molecular Cloning, A Laboratory Manual, 2^{nd} Edition, Cold Spring Harbor Laboratory Press, 1989) containing 100 μg/ml Ampicillin, 50 μg/ml Isopropyl-beta-D-thiogalactopyranoside and 40 μg/ml X-Gal (5-bromo-4-chloro-3-indolyl-beta-D-galactoside (Sigma, St. Louis, Mo.). Plates were incubated overnight at 37° C. White colonies were picked from the plates into 3 ml of LB medium containing 100 μg/ml Ampicillin. These liquid cultures were incubated shaking at 300 rpm overnight at 37° C. Plasmid DNA was extracted from these cultures using the Qiagen (Valencia, Calif.) Qiaquick Spin Miniprep kit (Qiagen). Five putative HSD1 clones were identified and prepared for a restriction enzyme digest reaction to confirm the presence of the expected HSD1 sequence and orientation within the vector. Five μl of each each miniprep DNA was mixed with 5 U HindIII, 5 U SphI, 2.5 μl 10×NEBuffer 2 (all reagents from New England Biolabs) in a final volume of 25 μl for 1 hrs at 37° C. The reaction was run on a 1% agarose gel and the DNA bands generated by the PCR reaction were visualized and photographed on a UV light box to determine which minipreps samples had PCR product of the size predicted for the corresponding HSD1 cDNA. An appropriate clone was identified and 25 μl of the miniprep DNA was mixed with 25 U HindIII, 25 U NotI, 5 μl 10×NEBuffer 2, 0.1 mg/ml bovine serum albumin (all reagents from New England Biolabs) in a final volume of 50 μl for 3 hrs at 37° C. The restriction enzyme fragment containing HSD1 cDNA was purified by agarose gel purification with the Qiaquick Gel Extraction Kit (Qiagen) into 50 μl of buffer EB contained in the kit. Approximately 6 μg of plasmid pcDNA3.1(+) (Invitrogen, Carlsbad, Calif.) was mixed with 25 U HindIII, 25 U NotI, 5 μl 10×NEBuffer 2, 0.1 mg/ml bovine serum albumin (all reagents from New England Biolabs) in a final volume of 50 μl for 3 hrs at 37° C. and purified by agarose gel purification with the Qiaquick Gel Extraction Kit (Qiagen) into 50 μl of buffer EB. Five p. 1 of the gel-purified, restriction enzyme-treated HSD1 (equivalent to approximately 20 ng) was used in a ligation reaction containing 5 μl of gel-purified, restriction enzyme-treated pcDNA3.1(+) (approximately 25 ng) using 1 μl of T4 DNA ligase and, 1.2 μl of 10× ligation buffer containing 5 mM ATP (all reagents from Promega, Madison, Wis.) in a final volume of 12.2 μl. The ligation reaction was carried out by incubating the samples overnight at 16° C. About 1 μl of the ligation reaction was used to transform NovaBlue chemically competent E. coli from Novagen (EMD Biosciences, Madison, Wis.). After the 1 hour recovery of the cells in SOC medium, the mixture was plated on LB medium agar plates (Sambrook, et al., in Molecular Cloning, A Laboratory Manual, 2^{nd} Edition, Cold Spring Harbor Laboratory Press, 1989) containing 100 μg/ml Ampicillin (Sigma, St. Louis, Mo.). Plates were incubated overnight at 37° C. White colonies were picked from the plates into 3 ml of LB medium containing 100 μg/ml Ampicillin. These liquid cultures were incubated shaking at 300 rpm overnight at 37° C. Plasmid DNA was extracted from these cultures using the Qiaquick Spin Miniprep kit (Qiagen, Valencia, Calif.). Six putative HSD1 clones were identified and prepared for a restriction enzyme digest reaction to confirm the presence of the expected HSD1 sequence and orientation within the vector. Five μl of each miniprep DNA was mixed with 5 U HindIII, 5 U NotI, 2.5 μl 10×NEBuffer 2, 0.1 mg/ml bovine serum albumin (all reagents from New England Biolabs) in a final volume of 20 μl for 1 hr at 37° C. The reaction was run on a 1% agarose gel and the DNA bands generated by the PCR reaction were visualized and photographed on a UV light box to determine which minipreps samples had PCR product of the size predicted for the corresponding HSD1 cDNA. DNA sequence analysis of the HSD1 cloned DNAs confirmed a polynucleotide sequence representing the full length coding region of HSD1.

[0142] Once an appropriate pcDNA3.1/HSD1 clone had been identified, purified plasmid DNA was prepared for mammalian cell transfection into HepG2 hepatoma cells (ATCC HB-8065) according to manufacturer's instructions using the FuGene 6 transfection reagent (Roche Applied Sciences, Indianapolis, Ind.). Stable transfectants of HepG2 cells were selected with Geneticin (0.8 mg/ml; Invitrogen, Carlsbad, Calif. in culture medium (Dulbecco's Modified Eagle Medium with high glucose containing 2 mM L-glutamine, 10% fetal bovine serum, 100 U/ml penicillin, 100 μg/ml Streptomycin, 10 μM sodium pyruvate, 100 μM non-essential amino acids, 0.003 N NaOH). HepG2 transfectants that over-expressed HSD1 are hereafter referred to as “HepG2/HSD1 cells.”

[0143] C. Confirmation of HSD1 expression in HepG2 cells. Expression of HSD1 in transfectants was confirmed by assessment of the oxidoreductase activity in cells using [³H]-cortisone as the reaction substrate (Schweizer et al., 2003, Mol. Cell. Endocrinol. 212:41-49; Alberts et al., 2002, Diabetologia 45:1528-1532; Kotelevtsev et al., 1997, Proc. Natl. Acad. Sci. 94:14924-14929), and by mRNA analysis.

[0144] Oxidoreductase Method: [1,2-³H]-cortisone (48.7 Ci/mmol) was added to a final concentration of 20 nM to HepG2/HSD1 (2×10⁶ cells/well in 6-well plates) and incubated for 1.5, 3, 6 and 22 hrs at 37° C. in culture medium (Dulbecco's Modified Eagle Medium with high glucose containing 2 mM L-glutamine, 10% fetal bovine serum, 100 U/ml penicillin, 100 μg/ml Streptomycin, 10 μM sodium pyruvate, 100 μM non-essential amino acids, 0.003 N NaOH and 0.8 mg/ml Geneticin). The samples (100 μl aliquots) were then extracted with 300 μl ethyl acetate and the upper, organic phases were dried. The dried organic extracts were then resuspended either in 100 μl DMSO for analysis by reverse-phase HPLC (buffer A=10% methanol/90% water; buffer B=90% methanol/10% water using a gradient from 20-45% Buffer B; YMC Combiscreen Pro C18 50 mm×4.6 mm column; flow rate 2.5 mL/min).

[0145] mRNA Analysis: mRNA prepared from transfectants was used to detect HSD1 expression. More specifically, total RNA was isolated from HepG2/HSD1 cells using the RNeasy 96-Kit (Qiagen Inc., Valencia, Calif.) following the manufacturer's instructions, including the optional on-column removal of contaminating DNA step by RNase-free DNase I treatment. The RNA was reverse-transcribed to single stranded cDNA using random hexamer primers with TAQman reverse transcription reagents (Applied Biosystems, Foster City, Calif.).

[0146] The sequences of the TAQman primers and probes used to detect the target cDNAs are shown in Table 1. Oligonucleotide probes were labeled with the 6-FAM fluorophore at the 5′ end (FAM) and a non-fluorescent quencher at the 3′ end (NFQ). Real-time PCR was performed on human HepG2/HSD1 cDNA using the TaqMan PCR Reagent Kits (Applied Biosystems, Foster City, Calif.) and appropriate primer/probe sets on an ABI Prism 7900HT Sequence Detection System (Applied Biosystems, Foster City, Calif.) in the 384-well format according to manufacturer's instructions. The levels of mRNA were normalized to the amount of 18S RNA detected in each sample using the Eukaryotic 18S rRNA Endogenous Control from Applied Biosystems.

TABLE 1
TAQman primers and probes used to detect HSD1.

| Primer | Sequence | SEQ ID NO: |
|---|---|---|
| Forward | GGAAGCATTGTTGTCGTCTCC | SEQ ID NO: 46 |
| Reverse | CTTGCTTGCAGAATAGGCAGC | SEQ ID NO: 47 |
| Probe | FAM-CTCTGGCTGGGAAAGTGGCTTATC | SEQ ID NO: 48 |
| | CAAT-TAMRA | |

[0147] Alternatively, HSD1 specific antibodies may be used to detect HSD1 expression in a subject using specific protein binding assays such as ELISA, Western blot, immunofluorescent microscopy, or immunohistochemical methods. HSD1 antibodies may be obtained from Cayman Chemical (Ann Arbor, Mich.) or The Binding Site (Birmingham, England). Methods of use of HSD1-specific antibodies to determine HSD1 localization and distribution have been described (Ricketts et al., 1998, J. Clin. Endocrinol. Metab. 83:1325-1335; Suzuki et al., 2001, Mol. Cell. Endocrinol. 173:121-125).

### Example 2

### Determination of Cortisone Response Signature Genes

[0148] HepG2 human hepatoma cells stably transfected with human 11βHSD1 (HepG2/HSD1 cells) were plated at 2×10⁶ cells per well on 6-well plates in 1 ml Culture Medium (DMEM with 2 mM L-Glutamine, 10% charcoal-dextran-treated FBS, 100 U/ml Penicillin, 100 μg/ml streptomycin, 10 μM sodium pyruvate, 100 μM non-essential amino acids, 0.003 N NaOH) at 37° C./5% CO₂. After 24 hours, the Culture Medium was replaced with 500 μl Culture Medium containing 1000 nM cortisone (500 nM final concentration) and 20 μM forskolin (10 μM final concentration). The cells were incubated for 20 hrs at 37° C./5% CO₂. Samples were run in triplicates.

[0149] Total RNA isolated from cultured cell samples was used to make fluorescently labeled cRNA that was hybridized to DNA oligonucleotide microarrays as described previously (Hughes et al., supra., Marton et al., 1998, Nat. Med. 4:1293-301). Briefly, 4 μg of total RNA from each cell culture sample was used to synthesize dsDNA through RT. cRNA was produced by in vitro transcription and labeled postsynthetically with Cy3 or Cy5. Two populations oflabeled cRNA, a control population from vehicle/forskolin treated cells and an experimental population, i.e., cortisone/forskolin plus vehicle or plus HSD1 test compound, were compared with each other by competitive hybridization to microarrays. Two hybridizations were done with each cRNA sample pair using a fluorescent dye reversal strategy.

[0150] The human microarrays used in this study contained 23,653 oligonucleotide probes corresponding to individual genes or expressed sequence tags. Oligonucleotide probe sequences were chosen to maximize gene specificity and minimize the 3′ replication bias inherent in RT of mRNA. In addition, the microarray format contained 2,107 control probes for quality control purposes. All oligonucleotide probes on the microarrays were synthesized in situ with inkjet technology (Agilent Technologies, Palo Alto, Calif.; Hughes et al., supra.).

[0151] After hybridization, arrays were scanned and fluorescence intensities for each probe were recorded. Ratios of transcript abundance (experimental to control) were obtained following normalization and correction of the array intensity data. Gene expression data analysis was done with the ROSETTA RESOLVER® gene expression analysis software (version 3.2, Rosetta Biosoftware, Seattle, Wash.). For each gene sequence present on the microarrays, statistical significance of differential gene expression was determined by calculating P values according to the following equation:

P value=2×(1−Erf(|xdev|))

where Erf is the error function for a Gaussian distribution of zero mean and xdev is the adjusted difference in fluorescence intensities between Cy3 and Cy5 signals calculated by the equation:

$$xdev = \frac{r - g}{\sqrt{{σ}_{r}^{2} + {σ}_{g}^{2}}}$$

where r is Cy5 intensity, g is Cy3 intensity, and u is the error associated with the respective channel.

[0152] Gene expression signatures elicited by cortisone alone were identified by microarray analysis of HepG2/HSD1 cells incubated with cortisone and forskolin for 20 hrs and compared to HepG2/HSD1 cells incubated with forskolin alone. The on-target signature is triggered by the cortisone treatment. There is no cortisone response signature without cortisone treatment. To broadly identify the genes responding to the cortisone treatment three replicates of gene expression measurements of cortisone treated HepB2/HSD1 cells were combined in an error weighted fashion using an error model developed for two-color hybridization experiments (see Parrish et al., 2004 J. Neurosci. Methods, 132:57-68) using Rosetta error model and selected those with p-value <0.01. This selection of genes is called the cortisone signature genes. The 77 cortisone response signature genes which exhibited a detectable change in expression level in response to cortisone with a p-value of less than 0.01 are presented in Table 2.

TABLE 2
Cortisone response signature gene markers.

| Reference | | | | |
|---|---|---|---|---|
| Transcript | Gene Name | SEQ ID NO: | Probe Sequence | SEQ ID NO: |
| NM_002165 | ID1 | SEQ ID NO: 49 | CAGAGACTTTAGGGGGTGGGATTCCACTCGTGTGT | SEQ ID NO: 50 |
| | | | TTCTATTTTTTGAAAAGCAGACATT | |
| NM_007256 | SLCO2B1 | SEQ ID NO: 51 | TGCTGGTTGGTATCTGTAAATGTTTAATAAATATC | SEQ ID NO: 52 |
| | | | TGAGCATGTATCTATCAACGCCAAG | |
| NM_005195 | CEBPD | SEQ ID NO: 53 | GGTAGCTTTTTCTACATCTTACTCCTGTTGATGCA | SEQ ID NO: 54 |
| | | | GCTAAGGTACATTTGTAAAAAGAAA | |
| NM_021175 | HAMP | SEQ ID NO: 55 | TATTTATTCCTGCTGCCCCAGAACATAGGTCTTGG | SEQ ID NO: 56 |
| | | | AATAAAATGGCTGGTTCTTTTGTTT | |
| AK095358 | | SEQ ID NO: 57 | TTTCCTCTAACCAAAATATACGTGTAGCCATTACC | SEQ ID NO: 58 |
| | | | AATGTACAACTCTCAATGCGGAGTT | |
| AK000757 | SORT1 | SEQ ID NO: 59 | CTATTCCCTTAGGACAGAAAATTGCATGTGAGGTG | SEQ ID NO: 60 |
| | | | GGATAATCGAGTTTCAGTGACCCAC | |
| NM_000429 | MAT1A | SEQ ID NO: 61 | CACACTCGACATGAAAATTCAGAATTTTATACTTT | SEQ ID NO: 62 |
| | | | CCCTACCCTCTAGAGAAATAAGATC | |
| NM_001353 | AKR1C1 | SEQ ID NO: 63 | CCCCTAATTATCCATTTTCTGATGAATATTAACAT | SEQ ID NO: 64 |
| | | | GGAGGGCATTGCATGAGGTCTGCCA | |
| NM_012242 | DKK1 | SEQ ID NO: 65 | GATGCTATGAAAACCTTTTATGACCTTCATCAACT | SEQ ID NO: 66 |
| | | | CAATCCTAAGGATATACAAGTTCTG | |
| BG539635 | IMAGE: 4692283 | SEQ ID NO: 67 | CCTGAGCTTAGTCTAGTAGGAGGTGACAGATTTGT | SEQ ID NO: 68 |
| | | | AAATAATAGATTTGAAGTTGCTGAG | |
| NM_002616 | PER1 | SEQ ID NO: 69 | GATGGCATTTGTGTTTTTGATATTTGTGTCTGTTA | SEQ ID NO: 70 |
| | | | CTACTTTTTTAATACAAAAAGATAA | |
| NM_000670 | ADH4 | SEQ ID NO: 71 | CCCTGCCTTTTGACAAAATCAGTGAGGCATTTGAC | SEQ ID NO: 72 |
| | | | CTAATGAACCAAGGAAAAAGCGTCC | |
| NM_001876 | CPT1A | SEQ ID NO: 73 | GCTGACCGGTGCATGTAAATACAGTATGCTCTTTG | SEQ ID NO: 74 |
| | | | GATGTAAATCTTAGAAATGCAGTGT | |
| NM_001860 | SLC31A2 | SEQ ID NO: 75 | GGAAAGAGAGAAAATCACTGCTGTATACTAAATAC | SEQ ID NO: 76 |
| | | | CTCACAGATTAGATGAAAAGATGGT | |
| XM_032571 | KIAA0888 | SEQ ID NO: 77 | AGACATTGAATGACTTTGTTAAAGGCACAATTAAT | SEQ ID NO: 78 |
| | | | CACATTGGTTGTACTCTGAAGACAG | |
| NM_002083 | GPX2 | SEQ ID NO: 79 | CCTTAAAGTTGCCATATAGATGTGAACTGCTCAAC | SEQ ID NO: 80 |
| | | | ACACAGATCTCCTACTCCATCCAGT | |
| NM_000151 | G6PC | SEQ ID NO: 22 | TGTTTTTCAATCTCATCTGATATGCAGAGTATTTC | SEQ ID NO: 81 |
| | | | TGCCCCACCCACCTACCCCCCAAAA | |
| NM_000689 | ALDH1A1 | SEQ ID NO: 82 | CATCCAGGATTTTTGTGGAAGAATCAATTTATGAT | SEQ ID NO: 83 |
| | | | GAGTTTGTTCGAAGGAGTGTTGAGC | |
| NM_017983 | WIPI49 | SEQ ID NO: 84 | GCGCGGGAGACATTGTATACACATCATGCTATTTA | SEQ ID NO: 85 |
| | | | AAATACGTTCAAACTATAGTGTAAA | |
| AL117595 | COPEB | SEQ ID NO: 86 | TCGGACACACTAAGGTTTTGATTTTGAATTTCAGC | SEQ ID NO: 87 |
| | | | CTTATTAGAAGATCTAACCTAAGAG | |
| AB037805 | KLHL14 | SEQ ID NO: 88 | TCAGAACCTTTTGTTGTCAACTGTCACTGTTTCTT | SEQ ID NO: 89 |
| | | | CCAAAAGTCACAATTTGTACAAGAA | |
| NM_000240 | MAOA | SEQ ID NO: 90 | TGATAGAATAAAGCCTTGTGATCACTTTCTGAAAT | SEQ ID NO: 91 |
| | | | TCACAAAGTTAAACGTGATGTGCTC | |
| NM_017526 | OBRGRP | SEQ ID NO: 92 | CACTTTAAGAAAGACTTCATAAGTAGGAGATGAGT | SEQ ID NO: 93 |
| | | | TTTATTCTCAGCAAATAGACCTGTC | |
| NM_001354 | AKR1C2 | SEQ ID NO: 94 | TGATCCCAAAAGATGAAAATGGAAAAATACTATTT | SEQ ID NO: 95 |
| | | | GACACAGTGGATCTCTGTGCCACAT | |
| NM_005763 | AASS | SEQ ID NO: 96 | AGGCAATACACCTCTGAACATGTGTGTGATAAATG | SEQ ID NO: 97 |
| | | | GGTTTGCTAATGTGCTGTTTTAAAG | |
| NM_017791 | C14orf58 | SEQ ID NO: 98 | CAAGGAACATGCTGTATGTAATAGAAGAAAGAAGT | SEQ ID NO: 99 |
| | | | CCACGTTTTCGGCAGAAGTAGTGAG | |
| AB033025 | KIAA1199 | SEQ ID NO: 100 | CATATGTTTCACAGTACAGGATCTGTACATAAAAG | SEQ ID NO: 101 |
| | | | TTTCTTTCCTAAACCATTCACCAAG | |
| NM_004117 | FKBP5 | SEQ ID NO: 102 | CCCAACTCAGGACAGAACAGTGTTTAATGTAAAGT | SEQ ID NO: 103 |
| | | | TTGTTATAGTCTATGTGATTCTGGA | |
| NM_002630 | PGC | SEQ ID NO: 20 | AGGATGAGTATGGACAGTTTCTCGTGAACTGTAAC | SEQ ID NO: 104 |
| | | | AGCATTCAGAATCTGCCCAGCTTGA | |
| NM_002069 | GNAI1 | SEQ ID NO: 105 | GGTGATGGCTTTGGAAATAACATAAATATACCTTG | SEQ ID NO: 106 |
| | | | TACTGAATGACAGACTATTACTACG | |
| NM_002153 | HSD17B2 | SEQ ID NO: 107 | GCTCACTATTTGCCTATTGGCATATATGATTACTT | SEQ ID NO: 108 |
| | | | TGCTAAAAGACATTTTGGCCAAGAC | |
| NM_001424 | EMP2 | SEQ ID NO: 109 | ATATGTACCAACAACACGAATTGCACAGTCATCAA | SEQ ID NO: 110 |
| | | | TGACAGCTTTCAAGAGTACTCCACG | |
| NM_013261 | PPARGC1A | SEQ ID NO: 111 | CTGTAGTCTAAGACCTGATCTATAGATACCTAGAA | SEQ ID NO: 112 |
| | | | TAGCCATGTACTATAATGTGATGAT | |
| NM_014899 | RHOBTB3 | SEQ ID NO: 113 | TATATCAGAAACTCACAAACCTAGACATGGAAAAA | SEQ ID NO: 114 |
| | | | CAGATTACTGTCTATTGTCAGCATC | |
| NM_000577 | IL1RN | SEQ ID NO: 115 | CAACCAACTAGTTGCTGGATACTTGCAAGGACCAA | SEQ ID NO: 116 |
| | | | ATGTCAATTTAGAAGAAAAGATAGA | |
| NM_017786 | FLJ20366 | SEQ ID NO: 117 | TTGCCGTTTTAAAATGTGTAATTGTTCCAGCATTC | SEQ ID NO: 118 |
| | | | CAATGGTCTTGTGCATAGCAGGGGA | |
| NM_002108 | HAL | SEQ ID NO: 119 | TCTTCAGCTATTAATTGTAGAGGTGATTAAAACCA | SEQ ID NO: 120 |
| | | | ACAAGGAGTTTCATGTGCAAAGGAG | |
| AA005351 | | SEQ ID NO: 121 | ATAATACCAAAGCAACCAAACCCATTAGCACCATT | SEQ ID NO: 122 |
| | | | CCATCCTATATGAGACCTTGCTTGG | |
| NM_006033 | LIPG | SEQ ID NO: 26 | AAGGACATTGTTTTAATCTGTATCGTGCCAAAGTT | SEQ ID NO: 123 |
| | | | GTATCACTGTTAAACTTCTGAAGAC | |
| NM_000242 | MBL2 | SEQ ID NO: 124 | AAGTATCAGGATACTATATTTTAGGTCTTAATACA | SEQ ID NO: 125 |
| | | | CACAGTTATGCCGCTAGATACATGC | |
| NM_016569 | TBX3 | SEQ ID NO: 126 | TTGGGTTTATTTCCAGGTCACAGAATTGCTGTTAA | SEQ ID NO: 127 |
| | | | CACTAGAAAACACACTTCCTGCACC | |
| NM_004657 | SDPR | SEQ ID NO: 128 | TTAATTTGCTCTTAGGTTCTATCTCTGTAGAATGT | SEQ ID NO: 129 |
| | | | CTCCAAGATTGAAGAAGAAACTGAG | |
| NM_005524 | HES1 | SEQ ID NO: 130 | AGTCATCAAAGCCTATTATGGAGAAAAGACGAAGA | SEQ ID NO: 131 |
| | | | GCAAGAATAAATGAAAGTCTGAGCC | |
| NM_004812 | AKR1B10 | SEQ ID NO: 132 | TTGGAAGACTATCCCTTCGATGCAGAATATTGAGG | SEQ ID NO: 133 |
| | | | TTGAATCTCCTGGTGAGATTATACA | |
| NM_004694 | SLC16A6 | SEQ ID NO: 134 | TTCTTTCTTCCTATGGTCTTGTCTGAATAAACTAC | SEQ ID NO: 135 |
| | | | TCTCCTGAATAAAACAACATCCAAC | |
| NM_001875 | CPS1 | SEQ ID NO: 136 | TGGCTAATCCAGGAATATTGTTATCCCTTCCCATT | SEQ ID NO: 137 |
| | | | ATATTGAAGTTGAGAAATGTGACAG | |
| NM_001206 | BTEB1 | SEQ ID NO: 138 | AAATGCACATTTACTTCCCAAAAAAGTTGTTACTT | SEQ ID NO: 139 |
| | | | GCCTTTTCAAGTGTGACAAACTCAC | |
| NM_003282 | TNNI2 | SEQ ID NO: 140 | CTCTGCAAACAGCTGCACGCCAAGATCGATGCGGC | SEQ ID NO: 141 |
| | | | TGAAGAGGAGAAGTACGACATGGAG | |
| NM_003943 | GENX- | SEQ ID NO: 142 | CTGGTCTGGATGTGATTAGTAAGGATACAAGATAA | SEQ ID NO: 143 |
| | 3414 | | TGTTCTAAGACTGCCTAATGCTTTT | |
| NM_000300 | PLA2G2A | SEQ ID NO: 144 | TTTGCTAGAAACAAGACGACCTACAATAAAAAGTA | SEQ ID NO: 145 |
| | | | CCAGTACTATTCCAATAAACACTGC | |
| NM_005139 | ANXA3 | SEQ ID NO: 146 | TTCAGCAATTAAATCGGATACTTCTGGAGACTATG | SEQ ID NO: 147 |
| | | | AAATCACACTCTTAAAAATCTGTGG | |
| NM_000111 | SLC26A3 | SEQ ID NO: 148 | TTTTGTAGCACTGACAGATTTCCATCCTAGTCACT | SEQ ID NO: 149 |
| | | | ACCTTCATGCATAGGTTTAGCAGTA | |
| NM_000353 | TAT | SEQ ID NO: 24 | TTTCTTAAAGTGAGAGCACGCCTGTACTAGAGCAA | SEQ ID NO: 150 |
| | | | GCAGGAATCAGAGACCTTCCAGAAA | |
| NM_004648 | PTPNS1 | SEQ ID NO: 151 | GCCTGTAAATTACTGTGAAATGTGAAACGTGCAAT | SEQ ID NO: 152 |
| | | | CTTGAAACTGAGGTGTTAGAAAACT | |
| NM_004778 | GPR44 | SEQ ID NO: 153 | GTCAGTGGAAGAAGCAGATGAGAAACTCTTGAGAT | SEQ ID NO: 154 |
| | | | CTTGGTCCTGTGTTTTTTCTGCCAC | |
| NM_003725 | RODH | SEQ ID NO: 155 | CTGGCATCATCAGAGTACTAACATGTTTATATTTC | SEQ ID NO: 156 |
| | | | AGATATCCAAAGCTTACCACTTTAG | |
| NM_020997 | LEFTB | SEQ ID NO: 157 | TCTTATTATTCACTGCACTATATTCTAAGCACTTA | SEQ ID NO: 158 |
| | | | CATGTGGAGATACTGTAACCTGAGG | |
| AB007969 | KIAA0500 | SEQ ID NO: 159 | CAGGGCTTAATTGACTATGTCTGAAAGTTTTTACT | SEQ ID NO: 160 |
| | | | GAGAGCTCTAAGAAAACTATTGAGG | |
| NM_001876 | CPT1A | SEQ ID NO: 161 | AATGACTGACATCATCACTTTGTTTGGTCTCAGTT | SEQ ID NO: 162 |
| | | | CTAATTCCAAAAAGTAATTCCACTG | |
| NM_000349 | STAR | SEQ ID NO: 163 | CGTGTTTAGAGTATGACACTAGGATTCAGATTGGT | SEQ ID NO: 164 |
| | | | GAAGTTTTTAGTACCAAGAAAACAG | |
| NM_004944 | DNASE1L3 | SEQ ID NO: 165 | CAAACGCTCCTAGACCCAAGGGTCTCATCTTATTA | SEQ ID NO: 166 |
| | | | ACCATTTCTTGCCTCTAAATAAAAT | |
| NM_004472 | FOXD1 | SEQ ID NO: 167 | CTCCCTTGACGTTTGGCAGATGAAAAACAACTAAG | SEQ ID NO: 168 |
| | | | CCTTTTTGAGGTGTAGAGATTCTCA | |
| NM_000735 | CGA | SEQ ID NO: 169 | TGAGATAAAACTCTCCTTTTCCTTACCATACCACT | SEQ ID NO: 170 |
| | | | TTGACACGCTTCAAGGATATACTGC | |
| NM_000777 | CYP3A5 | SEQ ID NO: 171 | CACAGATCCCCTTGAAATTAGACACGCAAGGACTT | SEQ ID NO: 172 |
| | | | CTTCAACCAGAAAAACCCATTGTTC | |
| NM_004839 | HOMER2 | SEQ ID NO: 12 | TCAACATCGAGAGGCTTTAAAACAACTGTTTAGTG | SEQ ID NO: 173 |
| NM_199330 | | SEQ ID NO: 13 | GAAACTTTCTGAGAGATGGAAAACA | |
| NM_199331 | | SEQ ID NO: 14 | | |
| NM_199332 | | SEQ ID NO: 15 | | |
| NM_016295 | GP2 | SEQ ID NO: 174 | ATTCATCTCTGTGATTCTCTTAATGAACAGTGCCA | SEQ ID NO: 175 |
| | | | GCCTTCTTGCTCAAGAAGTCAAGTC | |
| NM_018960 | GNMT | SEQ ID NO: 176 | TATAAGAGTGACTTGACCAAGGACGTCACAACATC | SEQ ID NO: 177 |
| | | | AGTGCTGATAGTGAACAACAAGGCC | |
| NM_004673 | ANGPTL1 | SEQ ID NO: 178 | ATTGATTGAATTAGAAGACTGGAGTGATAAAAAAG | SEQ ID NO: 179 |
| | | | TCTATGCAGAATACAGCAGCTTTCG | |
| NM_000765 | CYP3A7 | SEQ ID NO: 180 | GGATGAGACCGTAAGTGGAGCCTGATTTCCCTAAG | SEQ ID NO: 181 |
| | | | GACTTCTGGTTTGCTCTTTAAGAAA | |
| NM_002089 | CXCL2 | SEQ ID NO: 182 | TTCCCTCTGTGTTAGAGCAGAGAGGTTTCGATATT | SEQ ID NO: 183 |
| | | | TATTGATGTTTTCACAAAGAACAGG | |
| NM_006399 | BATF | SEQ ID NO: 184 | GCAGGCCCAATGCAGAAGAGTATTAAGAAAGATGC | SEQ ID NO: 185 |
| | | | TCAAGTCCCATGGCACAGAGCAAGG | |
| AK130329 | | SEQ ID NO: 186 | TATAAATTTGACTCTTAGTGTAAAATAATCTTAAT | SEQ ID NO: 187 |
| | | | ATTTGAATTATACATTCAGGTTATG | |
| NM_000376 | VDR | SEQ ID NO: 188 | TTGCCAGAAGTTTGTCAAGTCAACCAATGTAGAAA | SEQ ID NO: 189 |
| | | | GCTTTGCTTATGGTAATAAAAATGG | |
| NM_002727 | PRG1 | SEQ ID NO: 190 | AGTAGCTTGAGAAGCAAATTGGCAGGTAATATTTC | SEQ ID NO: 191 |
| | | | ATACCTAAATTAAGACTCTGACTTG | |

### Example 3

### Use of Cortisone Signature Genes to Evaluate HSD1-Agents

[0153] Gene expression changes in the cortisone signature genes were analyzed to further assess the degree to which HSD1-agents cause a reversal in the magnitude of the cortisone signature due to the degree of inhibition of HSD1 activity. Gene expression levels of the cortisone signature genes were measured in cortisone treated HepG2/HSD1 cells and HepG2/HSD1 cells treated with an HSD1-agent affecting HSD1 activity. In this example, replicate profiles were statistically averaged across the cortisone signature genes. Two gene expression vectors were then calculated: one representing the amplitudes of the cortisone signature genes in the cortisone treatment, and the other the amplitudes of the cortisone signature genes in the compound treatment. If a test compound treatment has a no HSD1 inhibition effect, and thus does not result in a significant change in the amplitude of the cortisone signature genes, then the linear regression between the amplitude vector of the cortisone treatment alone and the amplitude vector of the test agent will yield a slope of close to 1.0, which indicates that the test compound and the cortisone treatment alone profiles are statistically very similar, i.e., both profiles are from cells having very similar HSD1 activity. On the contrary, if the test compound treatment results in inhibition of HSD1 activity, then the slope of the linear regression between the cortisone treatment alone profile and the test compound will be smaller than 1.0. This measure of the inhibitory activity of an HSD1 compound is referred to as the “HSD1 signature reversal activity” of the compound.

[0154] Table 3 present data showing HSD1 signature reversal activity values measured for a variety of HSD1 inhibitor compounds measured from multiple experiments using HepG2/HSD1 cells incubated with 500 nM cortisone in the presence of 10 μM forskolin. The experimental conditions and microarray analysis was performed as set forth in Example 2 above, except that after 24 hours of cell culture, the Culture Medium was replaced with 500 μl Culture Medium containing 2× concentration of 11β-HSD1 inhibitor (14 μM) or vehicle for 20 min at 37° C./5% CO₂.

[0155] The HSD1 signature reversal activity values are presented in Table 3 for a series of test compounds and are sorted for convenience from less to more potent HSD1 inhibiting compounds. The cortisone slope to itself (defined as 1.0) is shown as control.

TABLE 3
Quantitative values for the strength of inhibition of
various HSD1 inhibitors using the cortisone
signature genes listed in Table 2.

| | HSD1 Signature Reversal |
|---|---|
| Compound Treatment | Activity Values |
| Cortisone/Forskolin (CF) | 1.0 |
| CF plus Compound 1 [415′] | 0.48 |
| CF plus Compound 2 [451′] | 0.22 |
| CF plus Compound 10 [400′] | 0.09 |
| CF plus Compound 3 [037′] | 0.07 |
| CF plus Compound 4 [544′] | 0.07 |
| CF plus Compound 5 [406′] | 0.05 |
| CF plus Compound 7 [750′] | 0.04 |
| CF plus 3-(2-chlorophenyl)-4-methyl-5-(4- | 0.03 |
| pentylbicyclo[2.2.2]oct-1-yl)-4H-1,2,4-triazole | |
| CE plus Compound 6 [698′] | 0.03 |

[0156] Table 4 shows an experiment where HSD1 activity of samples treated with some of the compounds evaluated in Table 3, were measured directly. HSD1 activity was measured by spiking the incubation medium with ³H-cortisone. After 21 hrs post compound treatment, conversion of the cortisone to cortisol was assessed by HPLC analysis.

TABLE 4
Direct measurement of HSD1 activity.

| | Percent Conversion |
|---|---|
| | to Cortisol |
| | (normalized to |
| Compound Treatment | cortisone/forskolin value) |
| Cortisone/Forskolin (CF) | 40 [1.0] |
| CF plus Compound 1 | 12 [0.3] |
| CF plus Compound 4 | 5 [0.12] |
| CF plus Compound 2 | 4 [0.1] |
| CF plus 3-(2-chlorophenyl)-4-methyl-5-(4- | 2 [0.05] |
| pentylbicyclo[2.2.2]oct-1-yl)-4H-1,2,4-triazole | |
| CF plus Compound 3 | 1 [0.025] |
| CF plus Compound 6 | 0.5 [0.0125] |
| CE plus Compound 5 | 0 |

[0157] A comparison of the data trends in Tables 3 and 4 demonstrate that the degree of reversal of the cortisone signature gene expression values measured for the HSD1 inhibitor compounds (Table 3) is similar to the amount of inhibition of HSD1 activity measured for each of the HSD1 compounds (Table 4).

### Example 4

### Evaluation of Off-Target Effect of HSD1 Compounds Using Microarrays

[0158] HSD1 compounds were evaluated using microarray gene expression measurements obtained from HepG2/HSD1 cells under conditions where the cells were not treated with cortisone. Transcription levels were compared between samples of cells treated for 20 hours with an HSD1 inhibitor compound plus forskolin and cells treated for 20 hours with forskolin alone. The off-target activity of each HSD1 inhibitor compound was estimated by determining the number of genes represented on the microarray exhibiting at least a 1.5-fold change, with a p-value of <0.01, in transcription level between the HSD1 compound treated cells compared to the control, forskolin, no HSD1, cell sample.

[0159] Table 5 shows the use of this method to rank-order a set of HSD1 inhibitor compounds.

TABLE 5
Evaluation of off-target affects of HSD1 compounds.

| | Number of |
|---|---|
| | Off-Target Genes |
| | (>1.5-fold change, |
| Compound Treatment | p-value <0.01) |
| 10 μM Forskolin alone plus Compound 2 | 627 |
| 10 μM Forskolin alone plus 3-(2-chlorophenyl)-4- | 394 |
| methyl-5-(4-pentylbicyclo[2.2.2]oct-1-yl)-4H- | |
| 1,2,4-triazole | |
| 10 μM Forskolin alone plus Compound 5 | 121 |
| 10 μM Forskolin alone plus Compound 6 | 96 |
| 10 μM Forskolin alone plus Compound 1 | 81 |
| 10 μM Forskolin alone plus Compound 3 | 58 |
| 10 μM Forskolin alone plus Compound 4 | 36 |
| 10 μM Forskolin alone plus Compound 7 | 35 |
| 10 μM Forskolin alone plus Compound 10 | 17 |

[0160] Based upon the data in Table 5, Compound 2 and the compound 3-(2-chlorophenyl)-4-methyl-5-(4-pentylbicyclo[2.2.2]oct-1-yl)-4H-1,2,4-triazole were identified as HSD1 inhibitors exhibiting high levels of off-target activity as indicated by the large number of genes exhibiting a significant change in expression changes compared to cells treated with forskolin alone. In contrast, HSD 1 inhibitor Compound 10 was identified as having low off-target activity because only 17 genes of the approximately 24,000 genes represented on the microarrays used in these experiments were recorded as having significant changes in expression level compared to forskolin only treated cells.

[0161] Joint consideration of the data in Tables 3 and Table 5 demonstrates the power of evaluating HSD1 inhibitory agents based using both the strength of the reversal of the cortisone signature genes, that is the degree of on target inhibition of HSD1, and the extent of HSD1 off-target effects on gene expression. For example, from inspection of Table 3 and Table 5 it is evident that Compounds 4 and 7 have the therapeutically desirable properties of relatively high inhibition of HSD1 activity and a relatively low level of off-target effects. Thus, Compounds 4 and 7 are relatively good candidate therapeutic compounds as compared to the other compounds tested.

### Example 5

### Identification of an Off-Target Response Signature

[0162] The off-target signature of HSD1 inhibitor compound 3-(2-chlorophenyl)-4-methyl-5-(4-pentylbicyclo[2.2.2]oct-1-yl)-4H-1,2,4-triazole was identified from experiments that were performed using cells treated with 3-(2-chlorophenyl)-4-methyl-5-(4-pentylbicyclo[2.2.2]oct-1-yl)-4H-1,2,4-triazole and foroskolin. Microarray experiments were conducted using the methods described in Example 2. In this study the off-target expression signature was computed by combining replicates of the 3-(2-chlorophenyl)-4-methyl-5-(4-pentylbicyclo[2.2.2]oct-1-yl)-4H-1,2,4-triazole+foroskolin samples in an error weighted fashion using an error model developed for two-color hybridization experiments (see Parrish et al., 2004 J. Neurosci. Methods, 132:57-68) and selecting those genes having expression level difference with a p-value<0.01 (no fold expression change cut-off). This procedure was carried out independently for the three replicate studies and then an off-target response signature of 330 gene markers was identified (Table 6) that was common to each of the three data sets.

TABLE 6
HSD1 off-target gene markers.

| Reference | | | | |
|---|---|---|---|---|
| Transcript | Gene Name | SEQ ID NO: | Probe Sequence | SEQ ID NO: |
| NM_005063 | SCD | SEQ ID NO: 30 | AATAATGCTACCAGGATGCTAAAGATGATGA | SEQ ID NO: 192 |
| | | | TGTTAACCCATTCCAGTACAGTATTCTTT | |
| Contig28780_RC | | SEQ ID NO: 193 | GGTTAATGAGACAAGTATGATCCAACTTGTG | SEQ ID NO: 194 |
| | | | TTTGCAATTAAGCAGGGATACAGGTACTG | |
| NM_018254 | RCOR3 | SEQ ID NO: 195 | CATAATATTGCGTTTGTGTCAGACATTGGAT | SEQ ID NO: 196 |
| | | | TTCTATGTTAGATATTAAAGAGCTTACTT | |
| NM_005950 | MT1G | SEQ ID NO: 197 | CTCCCAAGTACAAATAGAGTGACCCGTAAAA | SEQ ID NO: 198 |
| | | | TCTAGGATTTTTTGTTTTTTGCTACAATC | |
| NM_005951 | MT1H | SEQ ID NO: 199 | TGATGTCGGGACAGCCCTGCTGTCAGATGAA | SEQ ID NO: 200 |
| | | | AACAGAATGACACGTAAAATCCGAGGTTT | |
| NM_014443 | IL17B | SEQ ID NO: 201 | CTTGCACCTTTGTGCCAAGAAAGGCCTATGA | SEQ ID NO: 202 |
| | | | AAAGTAAACACTGACTTTTGAAAGCCAGA | |
| AK131274 | | SEQ ID NO: 203 | CTGCCCGAACATAACCATATTGCAGATGAAA | SEQ ID NO: 204 |
| | | | ATTTTCAATAGAGAATGACACAATTCTTG | |
| NM_001394 | DUSP4 | SEQ ID NO: 205 | AAAGAAATCTTCGAAGGTGTGGTTTTCATTT | SEQ ID NO: 206 |
| | | | CTCAGTCACCAACAGATGAATAATTATGC | |
| BM696623 | | SEQ ID NO: 207 | AATTCTTTTTTAAATTGGTATATTGTAAGAT | SEQ ID NO: 208 |
| | | | ATCTATGCAAAAAATGTTATGTGACGCAT | |
| NM_005763 | AASS | SEQ ID NO: 96 | AGGCAATACACCTCTGAACATGTGTGTGATA | SEQ ID NO: 97 |
| | | | AATGGGTTTGCTAATGTGCTGTTTTAAAG | |
| NM_016364 | DUSP13 | SEQ ID NO: 209 | CCTGACCCAATTCAGAGATTCTTTATGCAAA | SEQ ID NO: 210 |
| | | | AGTGAGTTCAGTCCATCTCTATAATAAAA | |
| NM_001096 | ACLY | SEQ ID NO: 32 | GGAGGAAGGGAATGAAACATTTATGGCCTCA | SEQ ID NO: 211 |
| NM_198830 | | SEQ ID NO: 33 | AGATACTATACATTTAAAGCACCCCAATG | |
| NM_005891 | ACAT2 | SEQ ID NO: 212 | CCAAGTTTACAGCTTGTACTTTACTTTAATG | SEQ ID NO: 213 |
| | | | TGTAATACTCAACTCACGGTACAAGACAA | |
| NM_018677 | ACAS2 | SEQ ID NO: 214 | GAACGCTTTGAGACAACCTACTTTAAGAAGT | SEQ ID NO: 215 |
| | | | TTCCTGGATACTATGTTACAGGAGATGGC | |
| NM_000434 | NEU1 | SEQ ID NO: 216 | GTCCTCTCCCACAAAAAAGTCCTGCCCTCAT | SEQ ID NO: 217 |
| | | | CTGAGAATACTGTCTTTCCATATGGCTAA | |
| NM_002004 | FDPS | SEQ ID NO: 218 | GGATCTTGTCAGATTCACTGAAAAGAGGTAC | SEQ ID NO: 219 |
| | | | AAATCTATTGTCAAGTACAAGACAGCTTT | |
| NM_004265 | FADS2 | SEQ ID NO: 220 | ACCCATAGGGAGCTGATCGTAATGTTTATCA | SEQ ID NO: 221 |
| | | | TGTTACTTCCCCACCCCTACATTTTTTGA | |
| NM_001360 | DHCR7 | SEQ ID NO: 28 | CCTCATCCCTAGGGTGTTGTGTAGAACTCTT | SEQ ID NO: 222 |
| | | | TTTAAACTCTATGCTCCGAGTAGAGTTCA | |
| NM_013262 | MYLIP | SEQ ID NO: 223 | CCAACGCACACCAGTCTTCTCAATCTGACTG | SEQ ID NO: 224 |
| | | | TAATCTAATCTGTTGTGCTTTTGTTGGAC | |
| AB040944 | ZSWIM5 | SEQ ID NO: 225 | CTTTCTTCGACAAACTGTCACCTTTTTTACT | SEQ ID NO: 226 |
| | | | CCAAACTGACCAAGAAGTTGTATTTGCCA | |
| NM_002304 | LFNG | SEQ ID NO: 227 | TTGTTTTTCTCTTTGCAAAGACATAGCTAGG | SEQ ID NO: 228 |
| | | | AAAGCGAATGATAAGGGAAAAGTTCTCAG | |
| NM_016075 | C13orf9 | SEQ ID NO: 229 | CCAGGGCTTTTAGAAGCAGTCATAGACATGT | SEQ ID NO: 230 |
| | | | CTTCAACATACCAAATAAAATACCTTTAA | |
| NM_004289 | NFE2L3 | SEQ ID NO: 231 | TTCATAGTTATGTCCAAAGAATAGGTTAACA | SEQ ID NO: 232 |
| | | | TGAAAACCCAGTAAGACTTTCCATCTTGG | |
| NM_004278 | PIGL | SEQ ID NO: 233 | TAGCTACACTGCTAGCTTCTCAAGTTCTTGT | SEQ ID NO: 234 |
| | | | GAAAAACAATTTACATAATGACACAGTAG | |
| NM_016348 | C5orf4 | SEQ ID NO: 235 | ATCAAACAAAATCCTTGAGGTTGGTATACAA | SEQ ID NO: 236 |
| | | | GTTAAGGCTGAAAAAAGGCCTTAAATTCC | |
| NM_006469 | IVNS1ABP | SEQ ID NO: 237 | AACTGTAGGGAACACCATTTATGCAGTGGAG | SEQ ID NO: 238 |
| | | | GATTCGATGGCAATGAATTTCTGAATACG | |
| NM_001486 | GCKR | SEQ ID NO: 239 | TGCTCTCGACCTAGTGGTTTCTACTCTCACC | SEQ ID NO: 240 |
| | | | GACTTATTCTGATTTCAGAAATAAAATGA | |
| AB033025 | KIAA1199 | SEQ ID NO: 100 | CATATGTTTCACAGTACAGGATCTGTACATA | SEQ ID NO: 101 |
| | | | AAAGTTTCTTTCCTAAACCATTCACCAAG | |
| NM_015986 | CRLF3 | SEQ ID NO: 241 | AGTAGATTTCCACTTGTTTAGGGATTAAGAA | SEQ ID NO: 242 |
| | | | GATGTTCTAGAATGTAGATACCTTGTCCA | |
| NM_198581 | ZC3H6 | SEQ ID NO: 243 | TAAGTGGAAGGAGAGTTACTGAAGGGAATGT | SEQ ID NO: 244 |
| | | | GAATTTTTACCGTTTGTACTTAAGATACA | |
| NM_007267 | EVER1 | SEQ ID NO: 245 | GGTGAGGACAAAATCTTCTTAATCAACAAGC | SEQ ID NO: 246 |
| | | | TTCACTCCATCTACGAGAGGAAGGAGAGG | |
| NM_000353 | TAT | SEQ ID NO: 24 | TTTCTTAAAGTGAGAGCACGCCTGTACTAGA | SEQ ID NO: 150 |
| | | | GCAAGCAGGAATCAGAGACCTTCCAGAAA | |
| NM_021184 | C6orf47 | SEQ ID NO: 247 | TAAATAACTGTGTCACATCAAATCCTAAATA | SEQ ID NO: 248 |
| | | | TACCACTACAAAGTGAGAGTTACTGCCAC | |
| AK000954 | | SEQ ID NO: 249 | TTTAAACACCTTAAGAAGGAACGAAAAAGTT | SEQ ID NO: 250 |
| | | | CTCTTGGATGACGTATATTCAAGTCTGAG | |
| NM_002053 | GBP1 | SEQ ID NO: 251 | TGGGCTAATGAAGAAAACTTCTCTTATTGTT | SEQ ID NO: 252 |
| | | | CAGTTCATCCAGATTATAACTTCAATGGG | |
| NM_018024 | FLJ10204 | SEQ ID NO: 253 | GCTGAATCAGCAATAAGTATTAGTCTTTTTG | SEQ ID NO: 254 |
| | | | GACTATGGTATTGTTAAAAAGACTGCAGC | |
| NM_004998 | MYO1E | SEQ ID NO: 255 | GTACTAAGTAGTATTCCACTGTACTCATTCA | SEQ ID NO: 256 |
| | | | TAAGGTAGGTTTTCTTACAAAACTCACAC | |
| BX537667 | | SEQ ID NO: 257 | TACCTTGAAACAACTGCAGTTCTAACTCATT | SEQ ID NO: 258 |
| | | | GTCACCATTTCTGTTTGACACGTTCCACT | |
| NM_004860 | FXR2 | SEQ ID NO: 259 | CCTTGTCTGGTGGATGAGAAGGCGTATTTAT | SEQ ID NO: 260 |
| | | | TTTTCACTGTACAGTATTTAAAAAGAGAA | |
| NM_006350 | FST | SEQ ID NO: 261 | CTGCCCGTAAAACCTGAGCCATTGATTCTTC | SEQ ID NO: 262 |
| | | | AGAACTTTCTGCAGTTTTTGACTTCATAG | |
| NM_005588 | MEP1A | SEQ ID NO: 263 | CATCACTCTTTTAAGATCTTGTTAAAGATTT | SEQ ID NO: 264 |
| | | | CAAATAAAGGTACTTCTGGCGAGCCAGGC | |
| NM_020371 | AVEN | SEQ ID NO: 265 | TTTACAAGCATGTCTCAAGCTAGTGTGTTCC | SEQ ID NO: 266 |
| | | | ATTATGCTCACAGCAGTAAATGCCTACCT | |
| NM_000368 | TSC1 | SEQ ID NO: 267 | CGGACAGTGTTGGACAGCTACATATCATGGA | SEQ ID NO: 268 |
| | | | CTACAATGAGACTCATCATGAACACAGCT | |
| NM_012448 | STAT5B | SEQ ID NO: 269 | CACCAGAGGAATCACTCTTGTGGATGTTTTA | SEQ ID NO: 270 |
| | | | ATTCCATGAATCGCTTCTCTTTTGAAACA | |
| NM_018371 | ChGn | SEQ ID NO: 271 | CAGAAGTAGGGACCGCTTTCTTACCTGTTTA | SEQ ID NO: 272 |
| | | | AATAAACCAAAGTATACCGTGTGAACCAA | |
| NM_001037 | SCN1B | SEQ ID NO: 273 | CCCATTCAGCCTCGTCTCTTTACAGAAGTAG | SEQ ID NO: 274 |
| | | | TTTTGTTCATGAAATAAAGACTCTTGGAC | |
| NM_000392 | ABCC2 | SEQ ID NO: 275 | AGTGTGTATAAAATGTACGTTTTAAAAAAGG | SEQ ID NO: 276 |
| | | | ATAAGTGAACACCCATGAACCTACTACCC | |
| NM_017566 | KLHDC4 | SEQ ID NO: 277 | AGGTGGATTCCCTCAGCAGCCTGTGTGTTGT | SEQ ID NO: 278 |
| | | | GTGAAATAAATTGGACTTGAAACAAAAAA | |
| NM_013261 | PPARGC1A | SEQ ID NO: 111 | CTGTAGTCTAAGACCTGATCTATAGATACCT | SEQ ID NO: 112 |
| | | | AGAATAGCCATGTACTATAATGTGATGAT | |
| NM_012296 | GAB2 | SEQ ID NO: 279 | ACTTGTGTCTTGAAATCTAGAATTATTTCAC | SEQ ID NO: 280 |
| | | | GCAGAATTGTCACTGTTTGTCAGGAAGAG | |
| Contig15566_RC | KLF7 | SEQ ID NO: 281 | GGATTATATTTGAATGTGTGGTGCATCCTTC | SEQ ID NO: 282 |
| | | | CTGGATGAAGGATGTGTGAGGGACCTTGA | |
| BG546127 | | SEQ ID NO: 283 | TCTGTCAGCATTTTTTAACTAAAGGTCACAA | SEQ ID NO: 284 |
| | | | CCCATTAACAACCATGAAATTGGTGTTGG | |
| NM_006703 | NUDT3 | SEQ ID NO: 285 | TGAGATGAAAACTTCCAATAATTTGTCCTAT | SEQ ID NO: 286 |
| | | | AATGTGCTGTACAGTTCAGTAGAGTGGTC | |
| NM_021090 | MTMR3 | SEQ ID NO: 287 | ATTAATATTTTCCTTTGTTAAAGGAGGAACC | SEQ ID NO: 288 |
| | | | GTAACTCTCCATAGCTGTACATATAACCC | |
| NM_001621 | AHR | SEQ ID NO: 289 | AATGGCTTCGGACAAAATATCTCTGAGTTCT | SEQ ID NO: 290 |
| | | | GTGTATTTTCAGTCAAAACTTTAAACCTG | |
| NM_002583 | PAWR | SEQ ID NO: 291 | TACATGAGTTCCAATACTTTTGGGATGTTAC | SEQ ID NO: 292 |
| | | | CCTCACATGTCCCTATACTGATGTGTGCC | |
| NM_002342 | LTBR | SEQ ID NO: 293 | ATTTATATTGTAACCACATGCAAATAAAAAG | SEQ ID NO: 294 |
| | | | AATGGGACCTAAACTCGTGCCGCTCGTGC | |
| NM_013974 | DDAH2 | SEQ ID NO: 295 | GATCCACTGGGTGAATCCTCCCTCTCAGAAC | SEQ ID NO: 296 |
| | | | CAATAAAATAGAATTGACCTTTTAAAAAA | |
| NM_003904 | ZNF259 | SEQ ID NO: 297 | TTTGAGTCAGAGATCTGTGCACACTTTTTAA | SEQ ID NO: 298 |
| | | | ACAGCTTGTGATGCAAGTGTGAGCCTATT | |
| AL133047 | DKFZp434D0215 | SEQ ID NO: 299 | GGACTATGGGGACTTCTAATACGTTTTGGTA | SEQ ID NO: 300 |
| | | | AAGAAGAGAGTATAAAGAAAATTCTTGTC | |
| NM_003373 | VCL | SEQ ID NO: 301 | ACTAAAGAAAGATTACTTAGAGGAAATAAGA | SEQ ID NO: 302 |
| | | | AAAATCATGTTTGCTCTCCCGGTTCTTCC | |
| NM_000663 | ABAT | SEQ ID NO: 303 | CACCTGTTCCTCAATATTTTCAGTGACATCT | SEQ ID NO: 304 |
| | | | TAGCAGACTTCAAGTAAAGAAGCCATTTC | |
| NM_003826 | NAPG | SEQ ID NO: 305 | ATAAGAAAACAATTGCTCAAGTCTTAGTTCA | SEQ ID NO: 306 |
| | | | TCTACACAGAAATGACTATGTAGCTGCAG | |
| NM_013370 | OKL38 | SEQ ID NO: 307 | GGACTTAGACCAGTGTGTGAGGTTGGACTTA | SEQ ID NO: 308 |
| | | | GACCAGTGTGTGAGGTGGTAACAGCGGCC | |
| NM_014000 | VCL | SEQ ID NO: 309 | CTGTGTGTTAGTTCCCAACATCGAATGTGTA | SEQ ID NO: 310 |
| | | | CAACTTAAGTTGGTCCTTTACACTCAGGC | |
| NM_018676 | THSD1 | SEQ ID NO: 311 | TTTTGTGTAACTATTTGTACCGTAGGACAGA | SEQ ID NO: 312 |
| | | | ATGTGAGGAGGAAGTAACACACAGAGGAG | |
| NM_016531 | KLF3 | SEQ ID NO: 313 | CTGAATTTATATCATCCAAAACTTCCATATG | SEQ ID NO: 314 |
| | | | GTCAGTAGTAGATGTTCTCTAATCCTCCC | |
| NM_004664 | LIN7A | SEQ ID NO: 315 | TGAGGGAAAGCTACTTGATCAAACATCCGAT | SEQ ID NO: 316 |
| | | | AGTCACAAATTTGAAACCGTGCTTCAGAA | |
| NM_015516 | E2IG4 | SEQ ID NO: 317 | GGGATGGAGACATGTCATTTGTAAAAGCAGA | SEQ ID NO: 318 |
| | | | AAAAGGTTGCATTTGTTCACTTTTGTAAT | |
| NM_004490 | GRB14 | SEQ ID NO: 319 | GGACAAAAAATAAAGCACTTTCAAATTATAC | SEQ ID NO: 320 |
| | | | CAGTAGAAGATGACGGTGAAATGTTCCAC | |
| AB028949 | KIAA1026 | SEQ ID NO: 321 | CTCTGTAATTGATGTACATACCGCAAACCGT | SEQ ID NO: 322 |
| | | | GTGTGAACCTGTCAACTCTCTGTCGTCTT | |
| NM_000574 | DAF | SEQ ID NO: 323 | AAAGCCTGTGAAAGGTGTCTTCTTTGACTTA | SEQ ID NO: 324 |
| | | | ATGTCTTTAAAAGTATCCAGAGATACTAC | |
| NM_005446 | P2RXL1 | SEQ ID NO: 325 | ACCTACTCTTTAGAGAGCCCCAGCATCTTTG | SEQ ID NO: 326 |
| | | | ATGTGGATTGGAGACAATTGCCTGGTTCC | |
| NM_003363 | USP4 | SEQ ID NO: 327 | ACTGCATATGCGAAGAACAAACTGAATGGTA | SEQ ID NO: 328 |
| | | | AATGGTATTACTTTGATGATAGCAACGTG | |
| NM_000782 | CYP24A1 | SEQ ID NO: 329 | GATTTCCCATGCCATAATTTTTCTGTCTATT | SEQ ID NO: 330 |
| | | | AAATGGGACAAGTGTAAAGCATGCAAAAG | |
| NM_014660 | PHF14 | SEQ ID NO: 331 | ATATGAACTTAGGAAATAAGGAGGGAAGTAC | SEQ ID NO: 332 |
| | | | AAAGATTATTGACTATACAACCTACCAGC | |
| NM_207343 | DKFZp547C195 | SEQ ID NO: 333 | GTCTGTATTCCAATGTTCGTAAATGAAACTA | SEQ ID NO: 334 |
| | | | TGTATATTATGCAGAAACAGTCTGTTCCC | |
| NM_012258 | HEY1 | SEQ ID NO: 42 | GAGTGGTCAATTGAGTAGTACAGTGGAAACT | SEQ ID NO: 335 |
| | | | GTTAAATGCATAACCTAATTTTCCTGGGA | |
| NM_003508 | FZD9 | SEQ ID NO: 336 | AATGATGTAATTTATTGTTGCGTTCCTCTGG | SEQ ID NO: 337 |
| | | | AAGCTGTGACTGGAATAAACCCCCGCGTG | |
| AB007932 | PLXNA2 | SEQ ID NO: 338 | GTGACTGCTGCTTTGCATGAAAACTCATTTG | SEQ ID NO: 339 |
| | | | ATGTATATTGGGGAAATAATGAGAACTTT | |
| NM_000874 | IFNAR2 | SEQ ID NO: 340 | GTGGAAATTTCACCTATATCATTGACAAGTT | SEQ ID NO: 341 |
| | | | AATTCCAAACACGAACTACTGTGTATCTG | |
| NM_018223 | CHFR | SEQ ID NO: 342 | GCTTCTTCTCAGGAATACAGTTTTCAACTGT | SEQ ID NO: 343 |
| | | | TGTCTTGCTCTTGATAGAAACTGAGAAGC | |
| NM_016446 | C9orf127 | SEQ ID NO: 344 | CTTCCCAAACTGTCATGCATAGATAATGGTC | SEQ ID NO: 345 |
| | | | ATTTTTGTAAGACACATTGGAGTAAATGA | |
| NM_006281 | STK3 | SEQ ID NO: 346 | AATTGGTAAACATCATGTTCCTGATGATAAC | SEQ ID NO: 347 |
| | | | CCAGTAGCAAAAACATTTGTACTGAGTGG | |
| NM_017762 | FLJ20313 | SEQ ID NO: 348 | TGTTGTTCAACAGTATTGAGTGTGAAGGAAA | SEQ ID NO: 349 |
| | | | TTTTGATGGCTTAATAAAATTCCACAGCG | |
| NM_017911 | C22orf8 | SEQ ID NO: 350 | ATCTGACAGGCTCTCTTTTGTCAAGGTGGTA | SEQ ID NO: 351 |
| | | | TTTTTCGTAATAAAAGGGGAAGAGTAAAG | |
| NM_018075 | FLJ10375 | SEQ ID NO: 352 | CATTAACAGACCCTTTATCAACATAAACAAT | SEQ ID NO: 353 |
| | | | AGTAACTGAGCTATTAAAGGCAACCTCTC | |
| NM_003224 | ARFRP1 | SEQ ID NO: 354 | TGTTTTCTCGAAGACAAACTTTCCTCTATGT | SEQ ID NO: 355 |
| | | | CTGGAAAAGCGTAGGCATCCGGAGGCTTT | |
| NM_017458 | MVP | SEQ ID NO: 356 | CAACCACGTGGTGCCTGTACTGCGCTAACTC | SEQ ID NO: 357 |
| | | | CTGATTAATACAATGGAAGTTTCTGGGCA | |
| NM_002662 | PLD1 | SEQ ID NO: 358 | CATTGATGTAAGGACTGTAAACATCAGCAAG | SEQ ID NO: 359 |
| | | | ACTTTATAATTCCTTCTGCCTAACTTGTA | |
| NM_005053 | RAD23A | SEQ ID NO: 360 | ACCCCAGAACAGAACCGTGTCTCTGATAAAG | SEQ ID NO: 361 |
| | | | GTTTTGAAGTGAATAAAGTTTTAAAAACT | |
| AK022225 | | SEQ ID NO: 362 | GGTACATAATGAATGCCTTTGGTACTCATTT | SEQ ID NO: 363 |
| | | | TCTGAATGGTTTGCTCTAGTAGGAAAGAA | |
| AL080218 | STAT5B | SEQ ID NO: 364 | ATCCTATGCAGAGTTACAGTCACAAAGTTGT | SEQ ID NO: 365 |
| | | | GTATTTTATGTTACAATAAAGCCTTCCTC | |
| NM_014028 | OSTM1 | SEQ ID NO: 366 | CTTTAGACCTAGCATCAGCAATAGATTTCAA | SEQ ID NO: 367 |
| | | | AGATAAGTATTAAGCGCTACCCTAAAGTG | |
| NM_002061 | GCLM | SEQ ID NO: 368 | CTGACTTAGGAGCATAACTTACCTGTAATTT | SEQ ID NO: 369 |
| | | | CCTTCAATATGAGAGAAAATTGAGATGTG | |
| NM_012227 | PGPL | SEQ ID NO: 370 | TGAACTGCTTTCCCTCGGAATGTTTCCGTAA | SEQ ID NO: 371 |
| | | | CAGGACATTAAACCTTTGATTTTAAAAAA | |
| NM_005908 | MANBA | SEQ ID NO: 372 | TGGCGATTGAAATGTTACAACAGAGATTTCT | SEQ ID NO: 373 |
| | | | TGGTGGTAGCTATTTGGGTAAAGGTATAT | |
| NM_014448 | ARHGEF16 | SEQ ID NO: 374 | GGACCCGGCAGGGAGATTTCGGTTTTGAGGT | SEQ ID NO: 375 |
| | | | TTCTAAATACATTAAAGTTATTTCTTAAG | |
| NM_012237 | SIRT2 | SEQ ID NO: 376 | ATGCTGGATGGGCAGAAGACATTGCTTATTG | SEQ ID NO: 377 |
| | | | GAGACAAATTAAAAACAAAAACAACTAAC | |
| AF131763 | MGC11349 | SEQ ID NO: 378 | CTGTCCTTCCTAAAAATGGAATAGTGGGATG | SEQ ID NO: 379 |
| | | | TAGTGCTTAATGGAAACTGCTAAATCTTT | |
| NM_018231 | FLJ10815 | SEQ ID NO: 380 | CACTGTTTCTTTTCTACTTGTGTATACTCGA | SEQ ID NO: 381 |
| | | | GAAAGGGAAGATGGTTAATAAAAGGGATT | |
| NM_014630 | ZNF592 | SEQ ID NO: 382 | CTGAGAACTAATTGTCACAGACATTGGAATA | SEQ ID NO: 383 |
| | | | TTTGTACTGCTCTCGTGCCATTTGAGAGG | |
| NM_012127 | CIZ1 | SEQ ID NO: 384 | CTGCCTGGAAACTTTGACATGGTTCATGTTT | SEQ ID NO: 385 |
| | | | TTACTCAAAATCCAATAAAACAAGGTAGT | |
| NM_012342 | BAMBI | SEQ ID NO: 386 | ATGACCTCTGCAAACAGAATCTTGGATATTT | SEQ ID NO: 387 |
| | | | CTTCTGAAGGATTATTTGCACAGACTTAA | |
| NM_014030 | GIT1 | SEQ ID NO: 388 | GTGGGTGGGCTGTCAAGACGTGTCATGTACA | SEQ ID NO: 389 |
| | | | TTTGTATCAAAAATAAAGAAGTGACCATG | |
| AB018310 | KIAA0767 | SEQ ID NO: 390 | GTACATCTGGGCAGATGTTTAATTTCTGTGA | SEQ ID NO: 391 |
| | | | CTAATCACTGAACTAGACGAATGTTAAAT | |
| NM_002957 | RXRA | SEQ ID NO: 392 | CACTGCTCTGCCTAAGAGATGTGTTGTCACC | SEQ ID NO: 393 |
| | | | CTCCTTATTTCTGTTACTACTTGTCTGTG | |
| NM_015675 | GADD45B | SEQ ID NO: 394 | TACCCATGAACTCCCAGTTTGCGAATTAATA | SEQ ID NO: 395 |
| | | | AGAGACAATCTATTTTGTTACTTGCACTT | |
| NM_001967 | EIF4A2 | SEQ ID NO: 396 | GGTTATAAATTATGATCTACCTACCAATCGT | SEQ ID NO: 397 |
| | | | GAAAACTATATTCACAGAATTGGCAGAGG | |
| NM_014325 | CORO1C | SEQ ID NO: 398 | TTTGATGACTGTACAACAGGAAGACTTGAAA | SEQ ID NO: 399 |
| | | | AATCACGTGGATTCATATTACCACCGCTC | |
| NM_004565 | PEX14 | SEQ ID NO: 400 | GACCTCAGAACGGAAGATAGGACTGTATATA | SEQ ID NO: 401 |
| | | | ATTGTAATAAATACCAGTTGCCACTATTT | |
| NM_005165 | ALDOC | SEQ ID NO: 402 | GAGGGTAGTACAGAAGCCCTGACTCATGCCT | SEQ ID NO: 403 |
| | | | TGAGTACATACCATACAGCAAATAAATGG | |
| NM_017836 | SLC41A3 | SEQ ID NO: 404 | ATGGGGCCTCATACAACCCTTCATCTGCACT | SEQ ID NO: 405 |
| | | | CAACATTTAATCGTGTCCTTGCTGTCTTT | |
| NM_017712 | PGPEP1 | SEQ ID NO: 406 | TTTAAAGCACTGTGTGACATAGCTCCTTAGA | SEQ ID NO: 407 |
| | | | GATATAACCTATTGTCTGCTCATTGTCAA | |
| NM_018182 | FLJ10700 | SEQ ID NO: 408 | AATACCTGGATTCCCCATTCTATCCACATAC | SEQ ID NO: 409 |
| | | | TGTAGCATTCATTCTCCATCTCTCTCACC | |
| NM_001292 | CLK3 | SEQ ID NO: 410 | GTGCCCAGCTGCCAGAAAGCACAGATTTGAC | SEQ ID NO: 411 |
| | | | CCAAGCTATTTATATGTTATAAAGTTATA | |
| NM_014719 | KIAA0738 | SEQ ID NO: 412 | ATAAGACTGCTAAAAGTATTTGGTATACAGT | SEQ ID NO: 413 |
| | | | CTGGAAAATAAAGTTGAGGGAATCTCTCC | |
| AB014538 | PHLDB1 | SEQ ID NO: 414 | CTGGGGGTTTTCAGTATTTGTAAGCATTTCA | SEQ ID NO: 415 |
| | | | GCAGAACAATAAAGCCTTTGGACTACGGA | |
| NM_003659 | AGPS | SEQ ID NO: 416 | TGGAGAAGATAATGGACAGAGAGGTTATTTG | SEQ ID NO: 417 |
| | | | CTGACCTATGTTATTGCATACATTCGAGA | |
| NM_002461 | MVD | SEQ ID NO: 418 | TGAAGGGCTTTCTCACCCCAGCTCTGGCTAT | SEQ ID NO: 419 |
| | | | GCCCAGTTCTCTGAGAAAGGAGCTCAGTG | |
| NM_001892 | CSNK1A1 | SEQ ID NO: 420 | TCGCCGAGATGACATGGAATCATTAGGATAT | SEQ ID NO: 421 |
| | | | GTTTTGATGTATTTTAATAGAACCAGCCT | |
| NM_017855 | APIN | SEQ ID NO: 422 | ACAGCCTAAGGGAACCATAAGAAGTTGCCCT | SEQ ID NO: 423 |
| | | | GATCATTCAGACATTTTGGGAAAAAGATG | |
| NM_018383 | WDR33 | SEQ ID NO: 424 | GAAATGGATGAGAAACATTGTATGTAGGGAT | SEQ ID NO: 425 |
| | | | GTTTAGCAATCAGTCTTTTAATAGACAGC | |
| AL117568 | | SEQ ID NO: 426 | TAGTGATGATAAATTCTGTAGGAGGGTCTAT | SEQ ID NO: 427 |
| | | | TCTGAGCCGTTAACTTCCTGTAAGGGGAA | |
| NM_014176 | HSPC150 | SEQ ID NO: 428 | CACTCCAATTTATCATCCAAACATTGATTCT | SEQ ID NO: 429 |
| | | | GCTGGAAGGATTTGTCTGGATGTTCTCAA | |
| NM_005662 | VDAC3 | SEQ ID NO: 430 | CTTCGACCAGGAGTCAAATTGACTTTATCAG | SEQ ID NO: 431 |
| | | | CTTTAATCGATGGGAAGAACTTCAGTGCA | |
| AK094351 | | SEQ ID NO: 432 | CCTGAACTTTGGGAGTTTTAAGCAATGATAC | SEQ ID NO: 433 |
| | | | AGTTGAAGGGACTGTTTATAATTTTCACA | |
| NM_004039 | ANXA2 | SEQ ID NO: 434 | TCCCGCAGTGAAGTGGACATGTTGAAAATTA | SEQ ID NO: 435 |
| | | | GGTCTGAATTCAAGAGAAAGTACGGCAAG | |
| NM_003983 | FLJ13291 | SEQ ID NO: 436 | TTAAAGAAGGAATCACTTTCCTATCATCTAA | SEQ ID NO: 437 |
| | | | ACCAAGTTCCTTCACACTGGAGTATTTTG | |
| NM_003504 | CDC45L | SEQ ID NO: 438 | CAAGTTTCTGGACGCACTTATTTCCCTCCTG | SEQ ID NO: 439 |
| | | | TCCTAGGAATTTGATTCTTCCAGAATGAC | |
| NM_005671 | D8S2298E | SEQ ID NO: 440 | GAATGAGGTTGAAATGTATGCAGTAAGGTAC | SEQ ID NO: 441 |
| | | | TCAGTAATTAATTGGTATTTTTTCCCAGC | |
| NM_003136 | SRP54 | SEQ ID NO: 442 | GCAAAATTGAACCAACAAATGGCCAAAATGA | SEQ ID NO: 443 |
| | | | TGGATCCTAGGGTTCTTCATCACATGGGT | |
| NM_003642 | HAT1 | SEQ ID NO: 444 | AGACTAATTAGCCCATATAAGAAAAAGCAGA | SEQ ID NO: 445 |
| | | | GAGATCTTGCTAAGATGAGAAAATGTCTC | |
| AK024898 | | SEQ ID NO: 446 | TCCAAAATGATTTCTGAACTATCTGCAGTGA | SEQ ID NO: 447 |
| | | | AAATGTATCTGATGGATTGTAGAGCAAAG | |
| NM_015895 | GMNN | SEQ ID NO: 448 | GCCGAAGTTTACCTCCACTAGTTCTTTGTAG | SEQ ID NO: 449 |
| | | | CAGAGTACATAACTACATAATGCCAACTC | |
| NM_005258 | GCHFR | SEQ ID NO: 450 | CTTCAAAGAGAAGAGCCTTGGGAAACAACTT | SEQ ID NO: 451 |
| | | | TTATGAATACTACGTCGATGACCCTCCCC | |
| NM_013412 | RABL2A | SEQ ID NO: 452 | GCTATAGTTAGGAATACACAAGCGGTAAAAT | SEQ ID NO: 453 |
| | | | CGAGTCCTTACAGCCATACCACAAGGTAC | |
| NM_006698 | BLCAP | SEQ ID NO: 454 | TTATCGAACGTGGTCTGATTTTGAGGTTTAG | SEQ ID NO: 455 |
| | | | CAATAGCTAGCTATATATGGTAGGTGCCG | |
| NM_002893 | RBBP7 | SEQ ID NO: 456 | AAGTACGAGAAATGTTTCTGTTGAATGTAAT | SEQ ID NO: 457 |
| | | | GCTACATGAATGCTTGATTTATCAAGCGC | |
| NM_014254 | TMEM5 | SEQ ID NO: 458 | GGCAAGTTGGTCAATGCTGCATGATGAGAGG | SEQ ID NO: 459 |
| | | | CCATATTTATGTAATTTCTTAGGAACGAT | |
| NM_014445 | SERP1 | SEQ ID NO: 460 | TTAACTTGAACTCATTCCTGATGTTTGATAC | SEQ ID NO: 461 |
| | | | CCTGGTTGAAAACAATTCAGTAAAGCATC | |
| NM_000790 | DDC | SEQ ID NO: 462 | GTTGATTAAAACATTATAGATTTTCATGTTC | SEQ ID NO: 463 |
| | | | TTGCAGTCATCAGAAGTGGTAGGAAAGCC | |
| NM_018186 | FLJ10706 | SEQ ID NO: 464 | CCAAGAAAGGATGGATAAGCTAAAACGTTAC | SEQ ID NO: 465 |
| | | | ATACATACTCTAGGGTGAAACTTATCACT | |
| NM_002945 | RPA1 | SEQ ID NO: 466 | TCTGTCAATTTCATTATCATCAAGCAGGAAT | SEQ ID NO: 467 |
| | | | TATGTCGTAAGTCACTGACCCTAACTGCA | |
| NM_006479 | PIR51 | SEQ ID NO: 468 | GACCTCTAGCCATTTTATGATTATGTTCTCT | SEQ ID NO: 469 |
| | | | GTAAAACTCTTCAAGACTTCAATGAGAAG | |
| NM_007081 | RABL2B | SEQ ID NO: 470 | GCTATAGTTAGGAATACACAAGCCGTAAAAT | SEQ ID NO: 471 |
| | | | CGAGTCCTTACAGCCATACCACAAGGTAC | |
| NM_002451 | MTAP | SEQ ID NO: 472 | ACATCTTTATTCTGCTAAAGAAGAGGATCAT | SEQ ID NO: 473 |
| | | | TGATTTCTGTACAGTCAGAACAGTACTTG | |
| NM_000179 | MSH6 | SEQ ID NO: 474 | GAAAAGCAAGAGAATTTGAGAAGATGAATCA | SEQ ID NO: 475 |
| | | | GTCACTACGATTATTTCGGGAAGTTTGCC | |
| NM_018571 | ALS2CR2 | SEQ ID NO: 476 | CAGAGTACTATGACAAGGAAACATCAGAATT | SEQ ID NO: 477 |
| | | | ACTAATCTAGCTAGTGTCATTTATTCTGG | |
| NM_006527 | SLBP | SEQ ID NO: 478 | ATTTGGTATTTGTAAATAGCACTAGTTAGAC | SEQ ID NO: 479 |
| | | | TCTTTAGAATACTCCAAGAGTTAGGGCAG | |
| NM_001809 | CENPA | SEQ ID NO: 480 | GGGGATGAATAGAAAACCTGTAAGCTTTGAT | SEQ ID NO: 481 |
| | | | GTTCTGGTTACTTCTAGTAAATTCCTGTC | |
| NM_017998 | C9orf40 | SEQ ID NO: 482 | GTAGACTAATGGTCGTTTTTCCTGTTTAAAG | SEQ ID NO: 483 |
| | | | GAGATAACTAATTTGAGCTGAAGCAATGC | |
| XM_496352 | | SEQ ID NO: 484 | AACCAACCCATAATTGCATTTTACTTGTCGT | SEQ ID NO: 485 |
| | | | GGTTCGATCTGATTGTATTGTCGAAGGAC | |
| NM_018509 | PRO1855 | SEQ ID NO: 486 | TACATAATACACACAATGAGATGAAGACAAT | SEQ ID NO: 487 |
| | | | ATAGAAGTCCGCATAGTCATCATAATCCC | |
| NM_033411 | RWDD2 | SEQ ID NO: 488 | CCTCATTTCTGACCTACTGAATGCTCAGCTG | SEQ ID NO: 489 |
| | | | TTTGGCATTTCCTTTGAATGACCCAGCAT | |
| NM_004147 | DRG1 | SEQ ID NO: 490 | GGAATTTTGATGACCTATTGGAAAAGATCTG | SEQ ID NO: 491 |
| | | | GGACTATCTGAAACTAGTGAGAATTTACA | |
| NM_003707 | RUVBL1 | SEQ ID NO: 492 | ACAGCATTGAGAAAGAGCATGTCGAAGAGAT | SEQ ID NO: 493 |
| | | | CAGTGAACTTTTCTATGATGCCAAGTCCT | |
| NM_018248 | FLJ10858 | SEQ ID NO: 494 | GCCAGGAATAAAAATTATTCCTGGATGCTAA | SEQ ID NO: 495 |
| | | | TATCTGTAGATTCTCTGGCATTTAGTCTC | |
| NM_001638 | APOF | SEQ ID NO: 496 | AAATGTTTGGGTGTTGAAGTCACAGGGTTTG | SEQ ID NO: 497 |
| | | | GTTTCGAATCTAGGCTCCACTTGTTAGAG | |
| NM_015417 | C20orf28 | SEQ ID NO: 498 | AAGGTTTGAAGGTTACGGCTCAGGGCTGCCC | SEQ ID NO: 499 |
| | | | CATTAAAGTCAGTGTTGTGTTCTAAAAAA | |
| AL049442 | FLJ14431 | SEQ ID NO: 500 | AAATCTGCTATTCTGAGAAGCATTGAATGAA | SEQ ID NO: 501 |
| | | | TTCTTAACAAGAAGACTCATCTGTAGCTG | |
| NM_003362 | UNG | SEQ ID NO: 502 | GTGAGCTTTATCAGATAAGAGACCGAGAGAA | SEQ ID NO: 503 |
| | | | GTAAGCTGGGTCTTGTTATTCCTTGGGTG | |
| NM_004300 | ACP1 | SEQ ID NO: 504 | GAAGTGTTTTAATTTCTACACACCCATAGTG | SEQ ID NO: 505 |
| | | | CACACTTGTATATTGAAAAGATAGGGAAG | |
| NM_138959 | VANGL1 | SEQ ID NO: 506 | AACAAACAAACAAAGGTCAAGCTCTAAGAAA | SEQ ID NO: 507 |
| | | | ATTACTGCTCAAACTTCACTACCCTGGAA | |
| NM_005758 | hnRNPA3 | SEQ ID NO: 508 | CACTTCCTACAGACCTGAATTCAAATTTGGA | SEQ ID NO: 509 |
| | | | TAGTCTGAGTTATTAAATTCCCAAAGACA | |
| NM_002417 | MKI67 | SEQ ID NO: 510 | CTGGATTTGAGAACAAATACCCACCCATTTC | SEQ ID NO: 511 |
| | | | CACCATGGTATGGTAACTTCTCTGAGCTT | |
| NM_000107 | DDB2 | SEQ ID NO: 512 | CGATACCCAGATCCTAATTTCAAAAGTTGTA | SEQ ID NO: 513 |
| | | | CCCCTTATGAATTGAGGACGATCGACGTG | |
| Contig32050_RC | FLJ12973 | SEQ ID NO: 514 | CTACTCTCAATCAAATTAGTACCATCATTTA | SEQ ID NO: 515 |
| | | | AGCTTTGAATACTTGGCAGTAATTGCCTG | |
| NM_000291 | PGK1 | SEQ ID NO: 516 | ACTTAGCATTTTCTGCATCTCCACTTGGCAT | SEQ ID NO: 517 |
| | | | TAGCTAAAACCTTCCATGTCAAGATTCAG | |
| NM_012323 | MAFF | SEQ ID NO: 518 | AGTGGCGTATGGCCCTGAGCTGGGCTTTATA | SEQ ID NO: 519 |
| | | | TTATATATCTGCAAATAAATCACATTTTA | |
| NM_014752 | KIAA0102 | SEQ ID NO: 520 | GGATTTTCTGACACAGATATGAGAAGTTGTA | SEQ ID NO: 521 |
| | | | GCTCTGATGTCTAGCTGTAGTCTCCTTGA | |
| BC033874 | | SEQ ID NO: 522 | GCAATTCGAAGTCCCTTTAATTGTTTTGTGC | SEQ ID NO: 523 |
| | | | TTCCAACCTGTTTTGTTCCCGTTCAGATT | |
| NM_005733 | KIF20A | SEQ ID NO: 524 | TGCTTTACCATATATCAGGAATTATATCCAG | SEQ ID NO: 525 |
| | | | GATGCAATACTCAGACACTAGCTTTTTTC | |
| NM_004404 | NEDD5 | SEQ ID NO: 526 | CTGGAAAATCTGTAAAAAAGAAAAACAAGTT | SEQ ID NO: 527 |
| | | | TGCTAGTGACTAAGCCCCGCATATGTGAG | |
| NM_017664 | ANKRD10 | SEQ ID NO: 528 | ACTTGGTCTCTGGAGGTTTTACCACATGTAA | SEQ ID NO: 529 |
| | | | CAGATTCCTTTATATGTAGTGAAAATCAC | |
| NM_016448 | RAMP | SEQ ID NO: 530 | CATTTGGCTGTCAGAAATTATACCGAGTCTA | SEQ ID NO: 531 |
| | | | CTGGGTATAACATGTCTCACTTGGAAAGC | |
| NM_005659 | UFD1L | SEQ ID NO: 532 | CTTTGCCTGTCTGACCACCGGGGATGTGATT | SEQ ID NO: 533 |
| | | | GCCATTAACTACAATGAAAAGATCTACGA | |
| NM_001001551 | C9orf103 | SEQ ID NO: 534 | ACCCCAATGTGTCAAGACAGACTTGTTTAGG | SEQ ID NO: 535 |
| | | | TGTAATTTTAGGAATTATGCTGGTTCATC | |
| NM_001790 | CDC25C | SEQ ID NO: 536 | ATAAGGCAGCCTTGAGTTGCATAGAGATTTG | SEQ ID NO: 537 |
| | | | TATTGGTTCAGGGAACTCTGGCATTCCTT | |
| NM_000481 | AMT | SEQ ID NO: 538 | AACCTACCTCACCATGGTTTTTCACATTGCA | SEQ ID NO: 539 |
| | | | AAGGGTAATAACATGGGCAGTGCGGACTT | |
| AL080182 | NDST2 | SEQ ID NO: 540 | GTCTTTTTGTAACTTATTTAACCCCAACATA | SEQ ID NO: 541 |
| | | | TCTTGGTATCCTCCATTAACACCACAGGG | |
| NM_016567 | BCCIP | SEQ ID NO: 542 | GGGAACCTTCATGACTGTTGGAATTGCTCTG | SEQ ID NO: 543 |
| | | | TCATAATAAGTCAGGGATATTTAGGGGGC | |
| NM_012396 | PHLDA3 | SEQ ID NO: 544 | TGGCCATTAGCATTTCATGTCTTTCCCCAAA | SEQ ID NO: 545 |
| | | | TGAAATGCCCTGCAAAGGGCAGTAACCCC | |
| NM_016488 | PPHLN1 | SEQ ID NO: 546 | GCCTTGGTTATCAACAGGTGGAATGTAGATA | SEQ ID NO: 547 |
| | | | TTGTAAAGCTTTTTGTGAATTAAAAGTGC | |
| NM_001262 | CDKN2C | SEQ ID NO: 548 | CCCTTGCTTCCCCTTTTGCCAATCTCAACAC | SEQ ID NO: 549 |
| | | | CCAAGTTGAAGACTTTGTTTTTAAAATGG | |
| U81002 | C15orf23 | SEQ ID NO: 550 | AGTCCGATTCCTAGAACAGCAAACCTTATGT | SEQ ID NO: 551 |
| | | | AACAATCAAGTAAATGATTTAACAACAGC | |
| NM_005132 | REC8L1 | SEQ ID NO: 552 | TCTGAATGTGCATTTCCAGCCTTCTTGCTCT | SEQ ID NO: 553 |
| | | | CAGAGCTATTGTTCAAGCAGAAAACAAGC | |
| NM_012429 | SEC14L2 | SEQ ID NO: 554 | CCTGGGTTTACAACGCTGTTAGGAAAATTAA | SEQ ID NO: 555 |
| | | | CCAATGAATAAAGCAACGTTCAGTGCGCA | |
| NM_017815 | C14orf94 | SEQ ID NO: 556 | TTTTGTCCGACACTTACACTGTTGAGAAAGT | SEQ ID NO: 557 |
| | | | GGAAGTTCATCGTCTGATTAGGGACCGTT | |
| NM_001823 | CKB | SEQ ID NO: 558 | TCACCCAGATTGAAACTCTCTTCAAGTCTAA | SEQ ID NO: 559 |
| | | | GGACTATGAGTTCATGTGGAACCCTCACC | |
| NM_003160 | AURKC | SEQ ID NO: 560 | AAATGATTGAGGGGAGAACATATGATGAAAA | SEQ ID NO: 561 |
| | | | GGTGGATTTGTGGTGCATTGGAGTGCTCT | |
| NM_001321 | CSRP2 | SEQ ID NO: 562 | CAACTCTGACTGAAAAAGAAGGTGAAATCTA | SEQ ID NO: 563 |
| | | | TTGTAAAGGATGCTATGCAAAGAACTTTG | |
| NM_018518 | MCM10 | SEQ ID NO: 564 | ATAGAGTGTTCACTTCTTTATCATAACAAAA | SEQ ID NO: 565 |
| | | | TTCTAGTGTTTATACGAACACCCAGAGGC | |
| NM_000363 | TNNI3 | SEQ ID NO: 566 | TGTGGACAAGGTGGATGAAGAGAGATACGAC | SEQ ID NO: 567 |
| | | | ATAGAGGCAAAAGTCACCAAGAACATCAC | |
| NM_016359 | NUSAP1 | SEQ ID NO: 568 | ACATTGCTTACTTAAAAGCTACATAGCCCTA | SEQ ID NO: 569 |
| | | | TCGAAATGCGAGGATTAATGCTTTAATGC | |
| NM_018244 | C20orf44 | SEQ ID NO: 570 | CTTGCTATAAAATGAGTCATATAAAGAAACT | SEQ ID NO: 571 |
| | | | CTATATGGGTGAGGTATATCCCACTTCTG | |
| NM_003276 | TMPO | SEQ ID NO: 572 | AAAGTAATTGCCTGTGTAGAACTACTTGTCT | SEQ ID NO: 573 |
| | | | TTTCTAAAGATTTGCGTAGATAGGAAGCC | |
| NM_016556 | HUMGT198A | SEQ ID NO: 574 | GCTACAGAGCTGTCTGATGCAATACTTGAAG | SEQ ID NO: 575 |
| | | | GATACCCCAAGAGCAAGAAGCAGTTCTTT | |
| NM_016095 | Pfs2 | SEQ ID NO: 576 | ATGGATTCAGGATGTTGTTGGAGAAACAAGT | SEQ ID NO: 577 |
| | | | TTGTGATTAGTCCTTAAAACTTAGCTCCC | |
| NM_014670 | BZW1 | SEQ ID NO: 578 | ACTCAGTAATGACTCAAGCCTCTGGCTATTA | SEQ ID NO: 579 |
| | | | ACATACCCTAGTTGCCGTTTTTTAATTGC | |
| NM_003483 | HMGA2 | SEQ ID NO: 580 | GTTGTACAATCAAAACACACTACTACCTCTT | SEQ ID NO: 581 |
| | | | AAGTCCCAGTATACCTCATTTTTCATACT | |
| NM_018131 | C10orf3 | SEQ ID NO: 582 | TTTATCCAAGCACTTAGAAAACCTACAATCC | SEQ ID NO: 583 |
| | | | TAATTTTGATGTCCATTGTTAAGAGGTGG | |
| NM_013290 | HUMGT198A | SEQ ID NO: 584 | AAATTGCAGTAGCTTGAGGTTAACATTTAGA | SEQ ID NO: 585 |
| | | | CTTGGAACAATGCTAAAGGAAAGCATTTG | |
| NM_020347 | LZTFL1 | SEQ ID NO: 586 | TGGATTTCTAAGGATGGTGGTTTGAGCCTTG | SEQ ID NO: 587 |
| | | | ATTAGACTTTTGATGTGCTAAGCCAGACA | |
| NM_012177 | FBXO5 | SEQ ID NO: 588 | GATTATTGTACGAAGTGTCTCTGTAATTATC | SEQ ID NO: 589 |
| | | | ATACTACTAAAGACTGTTCAGATGGCAAG | |
| NM_182705 | MGC45871 | SEQ ID NO: 590 | GTGTGAAATACGTCAGTGAAGTAAGTAGCAG | SEQ ID NO: 591 |
| | | | TGAGCGATTGTGAATGTGTAATGTAAATG | |
| NM_018204 | CKAP2 | SEQ ID NO: 592 | TCTCTCCACACATAAATAACACCACTAAAGT | SEQ ID NO: 593 |
| | | | TGTTTTGTAAGGTTCCAAACTAATATGGC | |
| CR622106 | | SEQ ID NO: 594 | TGGAAATCACACTTGTGAGGTATGGTATCCA | SEQ ID NO: 595 |
| | | | TTATCAACAGTGGATTCATGATTGACTTC | |
| AK001936 | | SEQ ID NO: 596 | GGAGTCCATCATTTAGCCAGTATACATAGAG | SEQ ID NO: 597 |
| | | | GAACTGCTTCGAATCAAGGCAACTGGTGA | |
| NM_012286 | MORF4L2 | SEQ ID NO: 598 | AAGCTCCTTTTCTCATTTCAAAGTTGCTACC | SEQ ID NO: 599 |
| | | | AGTGTATGCAGTAATTAGAACAAAGAAGA | |
| NM_017613 | DONSON | SEQ ID NO: 600 | TGAGGAAAAAAGCCTTCTAGCAAGGAAATTC | SEQ ID NO: 601 |
| | | | AAGATTCTTGAAGTTGAAGGAATATACTG | |
| NM_014584 | ERO1L | SEQ ID NO: 602 | AGGTCCTACCTATATTCCAAATACTTTCACT | SEQ ID NO: 603 |
| | | | CCCTTCACTTTACAGCAAGGGTCAGTAGA | |
| AA598803_RC | LOC139886 | SEQ ID NO: 604 | GTATTTTATGTCACCTAGATCTAATTCTGAA | SEQ ID NO: 605 |
| | | | AACATTGTAATAAAATAATTAGCTATAAT | |
| NM_013352 | SART2 | SEQ ID NO: 606 | TTAATGGTATACTCATGTTGAAAGATAAATG | SEQ ID NO: 607 |
| | | | TTGCTAAGTCCTGGTATGATGGTGTGAGC | |
| BC043009 | LOC338620 | SEQ ID NO: 608 | CTTGAGCACCTCATCTTTTGCTCAAATTGAA | SEQ ID NO: 609 |
| | | | ATGTCATCGAACTGTATTTCTCAAGTCAA | |
| NM_002875 | RAD51 | SEQ ID NO: 610 | CTATTGGAGGAAATATCATCGCCCATGCATC | SEQ ID NO: 611 |
| | | | AACAACCAGATTGTATCTGAGGAAAGGAA | |
| NM_014685 | HERPUD1 | SEQ ID NO: 612 | GAAGAGCTTTAATATATACTCTATGTAGTTT | SEQ ID NO: 613 |
| | | | AATAAGCACTGTACGTAGAAGGCCTTAGG | |
| NM_001034 | RRM2 | SEQ ID NO: 614 | GGTAGTATTGTAAAATTTCAAGTCATCCTTA | SEQ ID NO: 615 |
| | | | AACAAAATGATCCACCTAAGATCTTGCCC | |
| NM_001613 | ACTA2 | SEQ ID NO: 616 | CCTAGCCAAAGCTCTGACTCGTTACCTATGT | SEQ ID NO: 617 |
| | | | GTTTTTTAATAAATCTGAAATAGGCTACT | |
| NM_001343 | DAB2 | SEQ ID NO: 618 | TCTCCTTAGACACTTTGGAATCTAACCACTT | SEQ ID NO: 619 |
| | | | AAGGACCTTTTTAAAGAGATAGCTTCTCT | |
| Contig23667_RC | | SEQ ID NO: 620 | AACCTACAGAAAATTTGAAATTTGACAGTAA | SEQ ID NO: 621 |
| | | | GCACCTGTATATCCTTCCTCTAGTTTGTC | |
| BU743075 | | SEQ ID NO: 622 | TGTTCCAAGTAGGTTAGAACCATGGAAAAGA | SEQ ID NO: 623 |
| | | | GATTGCAAATGGTAGTTTCTTCTAGATAT | |
| NM_006143 | GPR19 | SEQ ID NO: 624 | AGTTCTTCAGCCTCTAAACCTACTCTGTATT | SEQ ID NO: 625 |
| | | | CAATTTATAATGCCAATTTTCGGAGAGGG | |
| NM_006145 | DNAJB1 | SEQ ID NO: 626 | TTCATGGACTATGGACTCTTTCAAAGGGATC | SEQ ID NO: 627 |
| | | | TGATCCTTTTGAATTTTGCACAGCCCTAG | |
| NM_019018 | FLJ11127 | SEQ ID NO: 628 | ACAAGTAGGGAAAAACAGCTAACCTGGAGAG | SEQ ID NO: 629 |
| | | | AAAGAATTTCTTTAACCTTTATGTTCTTC | |
| NM_002816 | PSMD12 | SEQ ID NO: 630 | AAATGTGGAGAAGATAACACTTGATTCCATT | SEQ ID NO: 631 |
| | | | TCATTGTCATTAGTGTATTAACCAGCAGG | |
| NM_004900 | APOBEC3B | SEQ ID NO: 632 | TGCTCACAGACACCAGCAAAGCAATGTGCTC | SEQ ID NO: 633 |
| | | | CTGATCAAGTAGATTTTTTAAAAATCAGA | |
| AX746755 | | SEQ ID NO: 634 | GTGGAGTAGGTTGAGGTGTAGCCATGACATT | SEQ ID NO: 635 |
| | | | CTGGAAACTACATTTTTTGTAATAGTCAT | |
| NM_203394 | E2F7 | SEQ ID NO: 636 | ATTCTGGTACAAGAGTCGGGGGTATAACTTT | SEQ ID NO: 637 |
| | | | TATACTTGAATCTACCTACCAAGTTTACA | |
| NM_004414 | DSCR1 | SEQ ID NO: 638 | AATGCCAAGTAACAATGCATGCTTTGGAAAT | SEQ ID NO: 639 |
| | | | TTGGAAGATGGTTTTATTCTTTGAGAAGC | |
| NM_003447 | ZNF165 | SEQ ID NO: 640 | CCCAAAACTTGCTAAACATGCAGCAGTTTTC | SEQ ID NO: 641 |
| | | | AGTGGAGATAAAACTCATCAGTGTAATGA | |
| NM_002265 | KPNB1 | SEQ ID NO: 642 | GAAGTGTGTTAGTCCAACTTTAAGAAAAATC | SEQ ID NO: 643 |
| | | | CAAACTCATCAGCTTTTGATAGCATCTTG | |
| NM_006163 | NFE2 | SEQ ID NO: 644 | GATGACAATGGCAACAAGTGTTTGGAAGTTC | SEQ ID NO: 645 |
| | | | CAAGGTGTGTTCAAAGAGGCTTGCCTTGA | |
| AK024294 | | SEQ ID NO: 646 | CTGTGACCTACAAACCCTTACTTAATTCAGT | SEQ ID NO: 647 |
| | | | GTTACTATAAATGATTCTTCCCTTAAACC | |
| NM_017957 | EPN3 | SEQ ID NO: 648 | GCAGATCAGTTTATTTAATGCTTGCAACGAC | SEQ ID NO: 649 |
| | | | TCTCTGAGGTAGAAAATATTGTTAATTCC | |
| NM_004111 | FEN1 | SEQ ID NO: 650 | AGCGTGACCCTTTTCAGTAGTGCTAGTCCCT | SEQ ID NO: 651 |
| | | | TTTTTACTTGATCTTAATGGCAAGAAGGC | |
| NM_012347 | FBXO9 | SEQ ID NO: 36 | GGTTCAACAAACTCATCTGGATACATCATTC | SEQ ID NO: 652 |
| NM_033480 | | SEQ ID NO: 37 | TTGTCACATTACTTACAAATCAACTGGTG | |
| NM_033481 | | SEQ ID NO: 38 | | |
| NM_001969 | EIF5 | SEQ ID NO: 653 | ACATCATGCTACACTTTACACTAAAAATCTA | SEQ ID NO: 654 |
| | | | TTACTGTGAGTGTGAAAAACTAGTGGTGG | |
| NM_001254 | CDC6 | SEQ ID NO: 655 | CAAGGAAACCCGTTTGACAAAGGTGTTTTTC | SEQ ID NO: 656 |
| | | | AAGATTGAAGAGAAAGAAATAGAACATGC | |
| NM_003258 | TK1 | SEQ ID NO: 657 | CTTCCTACCTCTGGTGATGGTTTCCACAGGA | SEQ ID NO: 658 |
| | | | ACAACAGCATCTTTCACCAAGATGGGTGG | |
| NM_004091 | E2F2 | SEQ ID NO: 659 | TATGAGCACCATGTAAGCCTCCTTGTATTGA | SEQ ID NO: 660 |
| | | | GATAATTGGGCATTAAACATTAAACTGCA | |
| NM_018154 | ASF1B | SEQ ID NO: 661 | TCCAGCTTTCTGGTGTCACAGGCGGGAATGT | SEQ ID NO: 662 |
| | | | TAGTTAGTAGGTAGACTTAGATCCCATTT | |
| NM_000040 | APOC3 | SEQ ID NO: 663 | GAAAGACTACTGGAGCACCGTTAAGGACAAG | SEQ ID NO: 664 |
| | | | TTCTCTGAGTTCTGGGATTTGGACCCTGA | |
| AK002107 | | SEQ ID NO: 665 | ACACAGTAGCAAAAGAGAAGATCTCATTTAC | SEQ ID NO: 666 |
| | | | AAATATCTATGGTGTTTCCTTGTTCTGTG | |
| NM_021175 | HAMP | SEQ ID NO: 55 | TATTTATTCCTGCTGCCCCAGAACATAGGTC | SEQ ID NO: 56 |
| | | | TTGGAATAAAATGGCTGGTTCTTTTGTTT | |
| NM_003282 | TNNI2 | SEQ ID NO: 140 | CTCTGCAAACAGCTGCACGCCAAGATCGATG | SEQ ID NO: 141 |
| | | | CGGCTGAAGAGGAGAAGTACGACATGGAG | |
| AB033092 | MTA3 | SEQ ID NO: 667 | GTCTGTAAGGAGATGCCATCTACTAACCAAT | SEQ ID NO: 668 |
| | | | TTGTATTGTGTTTCCAATAAATTCCTGGA | |
| NM_005498 | AP1M2 | SEQ ID NO: 669 | TTATATGAAGAAATAGAAGAGGGGCTTGAAG | SEQ ID NO: 670 |
| | | | TCCCCCTCGCGAGTGCCTTCTTGCAATTA | |
| Contig43632_RC | | SEQ ID NO: 671 | TCTGATCATTTATACTAGCTACTCAGTCTCT | SEQ ID NO: 672 |
| | | | ACTTTTTCTAGAAGTCCCCAGTAACCAAA | |
| NM_002309 | LIF | SEQ ID NO: 673 | TCCTTTCCACTGAAAAGCACATGGCCTTGGG | SEQ ID NO: 674 |
| | | | TGACAAATTCCTCTTTGATGAATGTACCC | |
| NM_000167 | GK | SEQ ID NO: 675 | AGGAAGAATTCGGATCCTTACCATTGGAATC | SEQ ID NO: 676 |
| | | | TTCCATCGAACATACTCAAACACTTTTGG | |
| NM_001082 | CYP4F2 | SEQ ID NO: 677 | TTTTTTCTGTCCAGGTTGTTCATATAATAAT | SEQ ID NO: 678 |
| | | | ATGCTGTGAGCATCTTTCCATGACATTAA | |
| NM_001657 | AREG | SEQ ID NO: 679 | GTTGCTGTTATTACAGTCCAGCTTAGAAGAC | SEQ ID NO: 680 |
| | | | AATACGTCAGGAAATATGAAGGAGAAGCT | |
| NM_003670 | BHLHB2 | SEQ ID NO: 681 | GACTCAGTTTTCAATTCCATCCTAAAACTCC | SEQ ID NO: 682 |
| | | | TTTTAACCAAGCTTAGCTTCTCAAAGGCC | |
| NM_000799 | EPO | SEQ ID NO: 683 | TCATGGGGTCCAAGTTTTGTGTATTCTTCAA | SEQ ID NO: 684 |
| | | | CCTCATTGACAAGAACTGAAACCACCAAA | |
| NM_015922 | NSDHL | SEQ ID NO: 685 | ACGATGAGGGCGGCAAAAACAGACATTTCTT | SEQ ID NO: 686 |
| | | | CCTTCATGGAACTGGATTTGGATTTCTTG | |
| AK123483 | | SEQ ID NO: 687 | CAGCCTTTCCTCATGTCAACACAGTTCACAA | SEQ ID NO: 688 |
| | | | TATAGTTTTCAAAGTACAGTTTAAAACTC | |
| NM_016371 | HSD17B7 | SEQ ID NO: 689 | ACACTCTGGAACATTGCATACCTTCTGTACA | SEQ ID NO: 690 |
| | | | TTCTGGGGTACATGGATTTCTACTGAGTT | |
| NM_139164 | STARD4 | SEQ ID NO: 691 | AGGGCTGAGTAATTGCCTTTCATACAAATAA | SEQ ID NO: 692 |
| | | | AAGCTTTAACTCTTTTCTCAAGAGTGTAC | |
| NM_002130 | HMGCS1 | SEQ ID NO: 693 | TAAAATAACAGCAAGTTTATGTGATCTTAAA | SEQ ID NO: 694 |
| | | | TCAAGGCTTGATTCAAGAACTGGTGTGGC | |
| NM_005261 | GEM | SEQ ID NO: 695 | ACTAGGCTCATCAGAATCGTGACTATTATTG | SEQ ID NO: 696 |
| | | | CTCCATCAAACTGTGAAAAGAAATGATGT | |
| NM_000859 | HMGCR | SEQ ID NO: 697 | GCTCTTGGAAAGCTGATGATGTCTCTTGTAG | SEQ ID NO: 698 |
| | | | AGATGACTCTGAAAAACATTCCAGGAAAC | |
| NM_005252 | FOS | SEQ ID NO: 699 | ATGGAGTGTGTATTGTTCCCAGTGACACTTC | SEQ ID NO: 700 |
| | | | AGAGAGCTGGTAGTTAGTAGCATGTTGAG | |
| NM_003129 | SQLE | SEQ ID NO: 700 | GTTGCAATCTATGCCGTGTATTTTTGCTTTA | SEQ ID NO: 702 |
| | | | AGTCAGAACCTTGGATTACAAAACCTCGA | |
| NM_000431 | MVK | SEQ ID NO: 703 | GGCCTTGGTTTATATGCACTTTCTTCCGATC | SEQ ID NO: 704 |
| | | | TGTACCTGAGAGGTTTGTGGAAAAGATGG | |
| NM_004508 | IDI1 | SEQ ID NO: 705 | CTTGTAAATAGTATTTACCAGTTAGCAAAGT | SEQ ID NO: 706 |
| | | | CTGTGTTTTCAGAATTACAGTGAGCACAG | |
| NM_006745 | SC4MOL | SEQ ID NO: 707 | GAATTCACCTAAAGATCAAAATATCATGGAT | SEQ ID NO: 708 |
| | | | TGAACCTCATCAATTGATAGCAGTGAGTG | |
| XM_373497 | LOC387763 | SEQ ID NO: 709 | ACCTGGATATGTCTGTGAGGCTCCTGAAAGG | SEQ ID NO: 710 |
| | | | AGACAAATAAAGTCAATATATTTGCACAA | |
| AK001732 | SMU1 | SEQ ID NO: 711 | AAGCTGGTAGTTATGATGTGCATAGTTTGTA | SEQ ID NO: 712 |
| | | | TCACCGTTTATGAAGATGGAGAATCTAGT | |
| NM_017785 | FLJ20364 | SEQ ID NO: 713 | GCCTCAAAAGTTACTATGGTGCTTAAGATTG | SEQ ID NO: 714 |
| | | | TCTTGATCTGACATATATCACCTTCTGGG | |
| NM_006895 | HNMT | SEQ ID NO: 715 | TGAGATGTAGCAAATTCCAATACATTATTGG | SEQ ID NO: 716 |
| | | | ACTTCCATTTGGAATCATATGGGATACTG | |
| NM_001813 | CENPE | SEQ ID NO: 717 | TGTAGTGCAGCTTAATTTCAATTCAGTCTTT | SEQ ID NO: 718 |
| | | | ACTTTGCCACTAGAGTTGAAAGATAAGGG | |
| NM_006644 | HSPH1 | SEQ ID NO: 719 | GTGGAATGGAAGAAATGTCGATCCTGTTGTA | SEQ ID NO: 720 |
| | | | ACTGATTGTGAACACTTTTATGAGCTTTA | |
| NM_005813 | PRKCN | SEQ ID NO: 721 | CTGAGTCACTAGGCAATCAATCTACTGTGGT | SEQ ID NO: 722 |
| | | | TTTACTATGTAAGGTGAAAATTAACTGGA | |
| NM_018229 | C14orf108 | SEQ ID NO: 723 | CTTTAAGTGACCATTCAAGAAAAGATGAAAT | SEQ ID NO: 724 |
| | | | CTCACGAACCTCAAAACTTCATTCATGTC | |
| NM_000354 | SERPINA7 | SEQ ID NO: 725 | GGCCATTGGCTAATTGCACGTGTGTATTGCA | SEQ ID NO: 726 |
| | | | ATGGGAAATAAATAAATAATATAGCCTGG | |
| AK022936 | | SEQ ID NO: 727 | GGAGTGAAGGTCTTATCTGCATTAATTTTGT | SEQ ID NO: 728 |
| | | | TAATGCACATTGTAGATGTGGAGAACATC | |
| BG897660 | | SEQ ID NO: 729 | TGTAAGAAAAGAGACATGGCCATTTCTAAAC | SEQ ID NO: 730 |
| | | | TATATAAGGTGAGTGTGTCTATTCCCAGC | |
| AB040937 | MGC16943 | SEQ ID NO: 731 | TAGTTGTTCTTGATCATGTGACTTGTAATCA | SEQ ID NO: 732 |
| | | | GGATTTAGAACGACAAAAGCCTTTACTAC | |
| NM_018685 | ANLN | SEQ ID NO: 733 | TTCCATGCTATCTAGAGGTTTTTGATGTCAT | SEQ ID NO: 734 |
| | | | CTTAAGAAACACACTTAAGAGCATCAGAT | |
| AK054652 | | SEQ ID NO: 735 | GAAGAAATGTTCCAGGATACACTTGGATTAG | SEQ ID NO: 736 |
| | | | TTATGCAGTATTTCTTATCAATGTCTAGC | |
| NM_012415 | RAD54B | SEQ ID NO: 737 | GAGAAGAAGTTCATACAGGTGATTCGTTGGA | SEQ ID NO: 738 |
| | | | AAAATTCATTGTCTCTAGAGATTGTCAGC | |
| NM_021141 | XRCC5 | SEQ ID NO: 739 | CTACCTAAGTCAGCTTTCATCTTTGTGGATG | SEQ ID NO: 740 |
| | | | GTGTCTCCTTTACTAAATAAGAAAATAAC | |
| NM_000672 | ADH6 | SEQ ID NO: 741 | GGTTGCTGATTATATGGCAGAGAAGTTGAAT | SEQ ID NO: 742 |
| | | | CTAGATCCACTAATTACTCATACTCTGAA | |
| NM_003035 | SIL | SEQ ID NO: 743 | TACAAGAGTGTATTTCCCCTTAATTAGGATG | SEQ ID NO: 744 |
| | | | CATGTTGATTAAACTCGAGATACAGCTTT | |
| NM_024624 | SMC6L1 | SEQ ID NO: 745 | GTTGTAGTTTTGAATGTTGTGCTCTTTCATA | SEQ ID NO: 746 |
| | | | CAGAACGGGAAACATAATCCTCAGGTATC | |
| NM_012115 | CASP8AP2 | SEQ ID NO: 747 | AAATGAGCACTAGAGGGAGGTTTATCACCTT | SEQ ID NO: 748 |
| | | | TTTGGTTACCAGATGATAATCTATATTTG | |
| NM_001067 | TOP2A | SEQ ID NO: 749 | GATGATTCTGACTCTAATTTTGAGAAAATTG | SEQ ID NO: 750 |
| | | | TTTCGAAAGCAGTCACAAGCAAGAAATCC | |
| AK093898 | | SEQ ID NO: 751 | GCACTTACTAGGCTAAACTTTCTGAAACTGA | SEQ ID NO: 752 |
| | | | TTGGTTTTGACCTATGAGATAAGGAAACA | |
| NM_017669 | FLJ20105 | SEQ ID NO: 753 | AGTGAAACTGAATATGAGGGAATTTTTGTTC | SEQ ID NO: 754 |
| | | | CCATAATTGGATTCTTTGGGAACATGAAG | |
| NM_001033 | RRM1 | SEQ ID NO: 755 | TAACTCATGAGAAGTACTGATAGGACCTTTA | SEQ ID NO: 756 |
| | | | TCTGGATATGGTCCTATAGGTTATTCTGA | |
| NM_004673 | ANGPTL1 | SEQ ID NO: 178 | TGTGAAGATAATCATTTGGACAACTCAAATC | SEQ ID NO: 757 |
| | | | CATCAACATGACCAATGTTTTTCATCTGC | |
| NM_133496 | SLC30A7 | SEQ ID NO: 758 | CAGTTAGCCTCAATGAAGATTCTATTTTGAA | SEQ ID NO: 759 |
| | | | CTAGACATCCTGTCAATAGTTTGTCAAGT | |
| NM_014829 | DDX46 | SEQ ID NO: 760 | GTGATCATTTCCTAAGAAAAGGTAAAATTCA | SEQ ID NO: 761 |
| | | | CTATCATATTTTGTGTCCCCACCTTGATG | |
| NM_000185 | SERPIND1 | SEQ ID NO: 762 | CATGCTGTAAGCTCATAGAAGTCACTGTAAC | SEQ ID NO: 763 |
| | | | TGTAGTGTGTCTGCTGTTACCTAGAGGGT | |
| NM_001316 | CSE1L | SEQ ID NO: 764 | AAGGTATCTGGAAATGTAGAGAAAAAGATCT | SEQ ID NO: 765 |
| | | | GTGCGGTTGGCATAACCAACTTACTAACA | |
| NM_004766 | COPB2 | SEQ ID NO: 766 | CTGGATGAAGATATTTTGGATGATTGACTGT | SEQ ID NO: 767 |
| | | | AATGCTTTCCATTTACCTGACTAAACAGA | |
| NM_006855 | KDELR3 | SEQ ID NO: 768 | GCCTTGTACTTAGTACCTTAATACCAATAAC | SEQ ID NO: 769 |
| | | | CTAATGGTACTTAGGCGAGTACCATTTGC | |
| Contig35294_RC | BRIP1 | SEQ ID NO: 770 | AAGAATTTAGAATATATTAGATCCCATCTAG | SEQ ID NO: 771 |
| | | | TATTATATATTTTTTCTAGTTGATCATTG | |
| NM_018206 | VPS35 | SEQ ID NO: 772 | GGTTTTAAACCAGCTTATCCAAAAGATTCGA | SEQ ID NO: 773 |
| | | | GAAGACCTCCCGAATCTTGAATCCAGTGA | |
| NM_005915 | MCM6 | SEQ ID NO: 774 | TTGGTAGTTAACCCTAACTACTTGCTCGAAG | SEQ ID NO: 775 |
| | | | ATTGAGATAGTGAAAGTAACTGACCAGAG | |
| NM_030917 | FIP1L1 | SEQ ID NO: 776 | TGTAATGCTGAAATTCAACTCTAACCAGTTC | SEQ ID NO: 777 |
| | | | TGAATCTATCGTCATACATACACATCATC | |
| NM_006704 | SGT1 | SEQ ID NO: 778 | TAAAACCTGTAGTGAGTTCTTCAGTCAGTCA | SEQ ID NO: 779 |
| | | | ACACTAAACCTGTTTTGTAAATTTGATGC | |
| NM_001539 | DNAJA1 | SEQ ID NO: 780 | TTTATCGTAGACCATATGAAAAGGGTCGCCT | SEQ ID NO: 781 |
| | | | AATCATCGAATTTAAGGTAAACTTTCCTG | |
| AK095780 | | SEQ ID NO: 782 | CTGGCTCATAGCATTTCACAAACATTATACT | SEQ ID NO: 783 |
| | | | TCAGAGTCCCAAAGCCTTTAAATAAAATG | |
| NM_021163 | RBAK | SEQ ID NO: 787 | GGCAACTACTAAGATTTCCTACGCTGTCCTT | SEQ ID NO: 785 |
| | | | AAAGCTTAGCATAATGTATATTTTAAGTG | |
| NM_006267 | RANBP2 | SEQ ID NO: 786 | AATCTTAACTATTGGTGTACTCATTTATGCA | SEQ ID NO: 787 |
| | | | TAGAGACTCGTTTATGAATGGGTAGAGCC | |
| NM_002614 | PDZK1 | SEQ ID NO: 788 | GTCTTACAGGCGGCTATTGCAGACGGCTAAT | SEQ ID NO: 789 |
| | | | TTATGCTTAACTTAGGAAGAGATAAGGCA | |
| NM_001326 | CSTF3 | SEQ ID NO: 790 | GTGGTATGTTTAAAAGAGACAACGCTTTGTT | SEQ ID NO: 791 |
| | | | ACAAGGTTCTTGGAAACAAAGTTGTATTG | |
| NM_000465 | BARD1 | SEQ ID NO: 792 | AGCATGTCTACGAAGAAAAGTATGTGAACAG | SEQ ID NO: 793 |
| | | | GAAGAAAAGTATGAAATTCCTGAAGGTCC | |
| NM_003115 | UAP1 | SEQ ID NO: 794 | GCCAACCATTTCTTCACTGTACCATTTCTGA | SEQ ID NO: 795 |
| | | | GAGATGTTGTCAATGTTTATGAACCTCAG | |
| BU616254 | | SEQ ID NO: 796 | AGTTCAAAATGAGTGAGAGAGAACTTTATGC | SEQ ID NO: 797 |
| | | | AGGTTGAGATAATGCCTAAAATAATGAGC | |
| Contig35088_RC | | SEQ ID NO: 798 | TAGTTAGCCGTACTTTAGTACTAGAAACAGT | SEQ ID NO: 799 |
| | | | AAATTGACATCCTTGAACTAATTCCTACC | |
| U83115 | AIM1 | SEQ ID NO: 800 | TCTAATTCTAAAATGCTGATCTTCTCTGGAG | SEQ ID NO: 801 |
| | | | TCTATGGTAGGCAATTATGGTCACTGGAA | |
| NM_016618 | LOC51315 | SEQ ID NO: 802 | TGTGAATAGGTTCTTTAACTTCTAACAAAGG | SEQ ID NO: 803 |
| | | | CCTAGTAAACAAAGTGTTTAGCATGCTTG | |
| NM_006267 | RANBP2 | SEQ ID NO: 804 | CAAAATGACATGTAAACTGACTTTTCCCGTA | SEQ ID NO: 805 |
| | | | TTAGTATTCCAAAGATGCTTAAAAGTGGC | |
| NM_003368 | USP1 | SEQ ID NO: 806 | ATCTGTTTAACTCATATTCTGCACGATCTGT | SEQ ID NO: 807 |
| | | | ATATAGTACATCAAACTTAGAGGTGTGAC | |
| NM_012484 | HMMR | SEQ ID NO: 808 | TCACTTGGTCCTACCTATTATCCTTCTACTT | SEQ ID NO: 809 |
| | | | GTCCAGTTCAAATAAGAAATAAGGACAAG | |
| NM_000057 | BLM | SEQ ID NO: 810 | TAAGCCTTCATATGCATTCTCATAACAACCG | SEQ ID NO: 811 |
| | | | AATCTCAATGTACATAGACCCTCTTTCTT | |
| AB002330 | SR140 | SEQ ID NO: 812 | GGAACATGTGACTGTAAAATCTCACATTTAC | SEQ ID NO: 813 |
| | | | AAAGTGCTTGATCTCTTCATATTTCACAC | |
| AL117611 | | SEQ ID NO: 814 | TGATTCACAGTAAAACTTTTCATGAATCATT | SEQ ID NO: 815 |
| | | | GAGGGTTAACTGTTATCACTTGCCAATGG | |
| NM_015515 | KRT23 | SEQ ID NO: 816 | ACAGTCTCACCAGACTTCTCATAATGCTCTT | SEQ ID NO: 817 |
| | | | AATATATTGCACTTTTCTAATCAAAGTGC | |
| NM_000562 | C8A | SEQ ID NO: 818 | TGGATGTTGACTGTTAACTAGAAGCTCTGTC | SEQ ID NO: 819 |
| | | | CTACTTACAGCACTTTGGATCATCAAAAA | |
| NM_016041 | F-LANa | SEQ ID NO: 820 | TATTGTCTGTCTCTGAATCCCTATAAAGCTT | SEQ ID NO: 821 |
| | | | CAAGTCTGTATGACATTCTTAACGCCAAA | |
| NM_015599 | PGM3 | SEQ ID NO: 822 | AATGAATATCCTTGTACCCTCTATATAGCTA | SEQ ID NO: 823 |
| | | | ACTTCCAAATGTAAGAGAACTATGGGGTA | |
| NM_006895 | HNMT | SEQ ID NO: 824 | GGCCTTTTTCTCGTCCTTATTAAACCCTTAG | SEQ ID NO: 825 |
| | | | TATACAAGGATAAATAAATTCTCACCTGC | |
| NM_001122 | ADFP | SEQ ID NO: 826 | GCTGCAGAAAATGAAGGAATCTTTAGATGAC | SEQ ID NO: 827 |
| | | | GTGATGGATTATCTTGTTAACAACACGCC | |
| NM_014294 | TRAM1 | SEQ ID NO: 828 | AGAAAATCAGAAACTGGATTTCAGTACTGGA | SEQ ID NO: 829 |
| | | | AACTTCAATGTGTTAGCTGTTAGAATCGC | |
| AK026912 | | SEQ ID NO: 830 | TACTTTCCCAATGCTTAGTAGCACTTGAGAC | SEQ ID NO: 831 |
| | | | TTTATTTCCATCGACAAAAACCAAGAAGG | |
| NM_005989 | AKR1D1 | SEQ ID NO: 832 | CTGTCATAGGCTGAGAGAGTTCTTCAAAAAT | SEQ ID NO: 833 |
| | | | TATGTTTTCCCAAGATCAGTTGCTTATAG | |

[0163] Table 7 shows the use of one of the genes, SCD, selected from Table 6 as an off-target signature gene to estimate the degree of off-target activity for a set of HSD1 inhibitor compounds. Microarray measurements were made as described in Example 2 for the HSD1 inhibitor compounds listed in Table 7. Each HSD1 inhibitor compound treated sample was compared to a forskolin alone cell sample. The HepG2/HSD1 cells used in these experiments were not contacted with cortisone. Table 7 lists the log ratio value measure for the microarray probe corresponding to the gene SCD.

TABLE 7
Estimation of HSD1 compound off-target activity
using SCD expression level.

| | Log ratio of |
|---|---|
| Compound Treatment | SCD gene expression |
| 10 μM Forskolin alone plus 3-(2-chlorophenyl)-4- | 0.45 |
| methyl-5-(4-pentylbicyclo[2.2.2]oct-1-yl)-4H- | |
| 1,2,4-triazole | |
| 10 μM Forskolin alone plus Compound 5 | 0.35 |
| 10 μM Forskolin alone plus Compound 2 | 0.32 |
| 10 μM Forskolin alone plus Compound 3 | 0.26 |
| 10 μM Forskolin alone plus Compound 6 | 0.23 |
| 10 μM Forskolin alone plus Compound 4 | 0.08 |
| 10 μM Forskolin alone plus Compound 1 | 0 |

[0164] The data in Table 7 show that measurement of SCD gene expression level is useful in the estimation of the off-target activity of an HSD1 inhibitor compound.

### Example 6

### Quantitative Real-time PCR Analysis of Cortisone Response Signature or Off-Target Response Signature Gene Activity in HepG2 Cells Expressing HSD1

[0165] HepG2 cells stably transfected with human HSD1, as previously described in Example 1, were plated in either 96 well or 24 well tissue culture plates. Cells were plated at a density of 6.25×10⁵ cells/well on 24 well plates in 500 μl DMEM culture medium prepared as previously described. For the 96 well plates, the cells were plated at a density of 1×10⁵ cells per well in 100 μl culture medium. The cells were incubated at 37° C. in a 5% CO₂ atmosphere. After 24 hours, the culture medium was removed and the cells were pre-incubated with, either 250 μl (24 well plate) or 50 μl (96 well plate), Culture Medium containing 2× concentration of HSD1 inhibitor (14 μM) or vehicle for 20 min at 37° C. in a 5% CO₂ atmosphere. Culture Medium (either 250 μl or 50 μl) containing 1000 nM cortisone (500 nM final concentration) or vehicle, and 20 μM forskolin (10 μM final concentration), was next added to the cells. The cells were further incubated for 20 hrs at 37° C. in a 5% CO₂ atmosphere. All conditions were run in duplicates.

[0166] HepG2/HSD1 cells were lysed using Trizol reagent (Life Technologies, Grand Island, N.Y.). Total RNA was isolated from HepG2/HSD1 lysate using the RNeasy 96-Kit (Qiagen Inc., Valencia, Calif.) following the manufacturer's instructions, including the optional on-column removal of contaminating DNA step by RNase-free DNase I treatment. The RNA was reverse-transcribed to single stranded cDNA using random hexamer primers with TAQman reverse transcription reagents (Applied Biosystems, Foster City, Calif.).

[0167] The sequences of the TAQman primers and probes used to detect the target cDNAs were synthesized by Qiagen Operon (Alameda, Calif.) and are shown in Tables 8 and 9.

TABLE 8
Real-time PCR primers and probes for cortisone response signature genes.

| Primer/ | | Reference | | Reference | | Primer/probe | |
|---|---|---|---|---|---|---|---|
| probe | Gene | transcript | SEQ ID NO: | Protein | SEQ ID NO: | Sequence | SEQ ID NO: |
| HuHOMER- | Homer-2 | NM_004839 | SEQ ID NO: 12 | NP_004830 | SEQ ID NO: 16 | CGCAGTTTGTCG | SEQ ID NO: 834 |
| 2_F | | NM_199330 | SEQ ID NO: 13 | NP_955362 | SEQ ID NO: 17 | TGTTTCCA | |
| | | NM_199331 | SEQ ID NO: 14 | NP_955363 | SEQ ID NO: 18 | | |
| | | NM_199332 | SEQ ID NO: 15 | NP_955364 | SEQ ID NO: 19 | | |
| HuHOMER- | Homer-2 | NM_004839 | SEQ ID NO: 12 | NP_004830 | SEQ ID NO: 16 | AAGCGAGAGGA | SEQ ID NO: 835 |
| 2_R | | NM_199330 | SEQ ID NO: 13 | NP_955362 | SEQ ID NO: 17 | GATTTCTATTCT | |
| | | NM_199331 | SEQ ID NO: 14 | NP_955363 | SEQ ID NO: 18 | GAA | |
| | | NM_199332 | SEQ ID NO: 15 | NP_955364 | SEQ ID NO: 19 | | |
| HuHOMER- | Homer-2 | NM_004839 | SEQ ID NO: 12 | NP_004830 | SEQ ID NO: 16 | ACCAGTTGTGC | SEQ ID NO: 836 |
| 2_Tqm | | NM_199330 | SEQ ID NO: 13 | NP_955362 | SEQ ID NO: 17 | CGTCCACTCAC | |
| (probe) | | NM_199331 | SEQ ID NO: 14 | NP_955363 | SEQ ID NO: 18 | | |
| | | NM_199332 | SEQ ID NO: 15 | NP_955364 | SEQ ID NO: 19 | | |
| hG6P-CAT-F | G6PC | NM_000151 | SEQ ID NO: 22 | NP_000142 | SEQ ID NO: 23 | TCCTCATCAAGT | SEQ ID NO: 837 |
| | | | | | | TGTTGCTGGA | |
| hG6P-CAT-R | G6PC | NM_000151 | SEQ ID NO: 22 | NP_000142 | SEQ ID NO: 23 | GCTGTGGATGT | SEQ ID NO: 838 |
| | | | | | | GGCTGAAAGT | |
| hG6P-CAT- | G6PC | NM_000151 | SEQ ID NO: 22 | NP_000142 | SEQ ID NO: 23 | TCCTGTCAGGC | SEQ ID NO: 839 |
| Tqm(probe) | | | | | | ATTGCTGTTGCA | |
| | | | | | | GA | |
| HuPGC_F | PGC | NM_002630 | SEQ ID NO: 20 | NP_002621 | SEQ ID NO: 21 | CCGGCTTCTTTG | SEQ ID NO: 840 |
| | | | | | | GCTATGAC | |
| HuPGC_R | PGC | NM_002630 | SEQ ID NO: 20 | NP_002621 | SEQ ID NO: 21 | ACTCAAGCCGA | SEQ ID NO: 841 |
| | | | | | | ACTCCTGGTT | |
| HuPGC_P | PGC | NM_002630 | SEQ ID NO: 20 | NP_002621 | SEQ ID NO: 21 | CTGACTGTCCA | SEQ ID NO: 842 |
| (probe) | | | | | | GAGCATCCAGG | |
| | | | | | | TC | |
| hTAT_F | TAT | NM_000353 | SEQ ID NO: 24 | NP_000344 | SEQ ID NO: 25 | TGTTCCTGCTTT | SEQ ID NO: 843 |
| | | | | | | TCCCCAAGT | |
| hTAT_R | TAT | NM_000353 | SEQ ID NO: 24 | NP_000344 | SEQ ID NO: 25 | AAGGGAGTAAT | SEQ ID NO: 844 |
| | | | | | | CTGCGATGTGA | |
| | | | | | | AT | |
| hTAT_P | TAT | NM_000353 | SEQ ID NO: 24 | NP_000344 | SEQ ID NO: 25 | CAACCACACCC | SEQ ID NO: 845 |
| (probe) | | | | | | ACACTCAGATC | |
| | | | | | | CTCCT | |
| HuLIPG_F | LIPG | NM_006033 | SEQ ID NO: 26 | NP_006024 | SEQ ID NO: 27 | CCCAGTGGAGT | SEQ ID NO: 846 |
| | | | | | | TGGGATTTCT | |
| HuLIPG_R | LIPG | NM_006033 | SEQ ID NO: 26 | NP_006024 | SEQ ID NO: 27 | GCCTTTCCCCAT | SEQ ID NO: 847 |
| | | | | | | GCATATACA | |
| HuLIPG_P | LIPG | NM_006033 | SEQ ID NO: 26 | NP_006024 | SEQ ID NO: 27 | CCTCTTTCTGTT | SEQ ID NO: 848 |
| (probe) | | | | | | TGGATGGTGTAT | |

TABLE 9
Real-time PCR primers and probes for off-target signature genes.

| | | Reference | | Reference | | Primer/Probe | |
|---|---|---|---|---|---|---|---|
| Primer/probe | Gene | transcript | SEQ ID NO: | Protein | SEQ ID NO: | Sequence | SEQ ID NO: |
| huDHCR7_F | DHCR7 | NM_001360 | SEQ ID NO: 28 | NP_001351 | SEQ ID NO: 29 | CACCTTTACTA | SEQ ID NO: 849 |
| | | | | | | GTCCTTTGGAG | |
| | | | | | | ACAA | |
| huDHCR7_R | DHCR7 | NM_001360 | SEQ ID NO: 28 | NP_001351 | SEQ ID NO: 29 | CACCAGTGTG | SEQ ID NO: 850 |
| | | | | | | GGCAGAGTGT | |
| huDHCR7_P | DHCR7 | NM_001360 | SEQ ID NO: 28 | NP_001351 | SEQ ID NO: 29 | TTACCTGTATT | SEQ ID NO: 851 |
| (probe) | | | | | | AGGAGCCCAG | |
| | | | | | | GCC | |
| HuSCD_F | SCD | NM_005063 | SEQ ID NO: 30 | NP_005054 | SEQ ID NO: 31 | CACCACATTCT | SEQ ID NO: 852 |
| | | | | | | TCATTGATTGCA | |
| HuSCD_R | SCD | NM_005063 | SEQ ID NO: 30 | NP_005054 | SEQ ID NO: 31 | GCGGCCTTGG | SEQ ID NO: 853 |
| | | | | | | AGACTTTCTT | |
| HuSCD_P | SCD | NM_005063 | SEQ ID NO: 30 | NP_005054 | SEQ ID NO: 31 | CCGCCCTCGGT | SEQ ID NO: 854 |
| (probe) | | | | | | CTGGCCTATG | |
| HuACLY_F | ACLY | NM_001096 | SEQ ID NO: 32 | NP_001087 | SEQ ID NO: 34 | GGTCACCGAG | SEQ ID NO: 855 |
| | | NM_198830 | SEQ ID NO: 33 | NP_942127 | SEQ ID NO: 35 | TGAAGTCGATA | |
| | | | | | | AA | |
| HuACLY_R | ACLY | NM_001096 | SEQ ID NO: 32 | NP_001087 | SEQ ID NO: 34 | GAAGTGCTGC | SEQ ID NO: 856 |
| | | NM_198830 | SEQ ID NO: 33 | NP_942127 | SEQ ID NO: 35 | CTGACGTAATC | |
| | | | | | | TT | |
| HuACLY_P | ACLY | NM_001096 | SEQ ID NO: 32 | NP_001087 | SEQ ID NO: 34 | AACCCAGACA | SEQ ID NO: 857 |
| (probe) | | NM_198830 | SEQ ID NO: 33 | NP_942127 | SEQ ID NO: 35 | TGCGAGTGCA | |
| | | | | | | GATC | |
| huFBXO9_F | FBXO9 | NM_012347 | SEQ ID NO: 36 | NP_036479 | SEQ ID NO: 39 | TCTTCCGATGG | SEQ ID NO: 858 |
| | | NM_033480 | SEQ ID NO: 37 | NP_258441 | SEQ ID NO: 40 | GTGGTGTCT | |
| | | NM_033481 | SEQ ID NO: 38 | NP_258442 | SEQ ID NO: 41 | | |
| huFBXO9_R | FBXO9 | NM_012347 | SEQ ID NO: 36 | NP_036479 | SEQ ID NO: 39 | TCTGCACACCA | SEQ ID NO: 859 |
| | | NM_033480 | SEQ ID NO: 37 | NP_258441 | SEQ ID NO: 40 | GCGACAACT | |
| | | NM_033481 | SEQ ID NO: 38 | NP_258442 | SEQ ID NO: 41 | | |
| huFBXO9_P | FBXO9 | NM_012347 | SEQ ID NO: 36 | NP_036479 | SEQ ID NO: 39 | TGACTTGGACC | SEQ ID NO: 860 |
| (probe) | | NM_033480 | SEQ ID NO: 37 | NP_258441 | SEQ ID NO: 40 | TCAGATCATTG | |
| | | NM_033481 | SEQ ID NO: 38 | NP_258442 | SEQ ID NO: 41 | GA | |
| huHEY1_F | HEY1 | NM_012258 | SEQ ID NO: 42 | NP_036390 | SEQ ID NO: 43 | GCTGCCTCTGC | SEQ ID NO: 861 |
| | | | | | | TCTCCTCAGT | |
| huHEY1_R | HEY1 | NM_012258 | SEQ ID NO: 42 | NP_036390 | SEQ ID NO: 43 | GTAAGTGGAA | SEQ ID NO: 862 |
| | | | | | | GGAGCCGAAA | |
| | | | | | | GA | |
| huHEY1_P | HEY1 | NM_012258 | SEQ ID NO: 42 | NP_036390 | SEQ ID NO: 43 | CCTCCCTGTCG | SEQ ID NO: 863 |
| (probe) | | | | | | GCCTTCCCCTT | |

[0168] Oligonucleotide probes were labeled with the 6-FAM fluorophore at the 5′ end (FAM) and a non-fluorescent quencher at the 3′ end (NFQ). Real-time PCR was performed on human HepG2/HSD1 cDNA using the TaqMan Universal PCR Master Mix (Applied Biosystems, Foster City, Calif.) and appropriate primer/probe sets on an ABI Prism 7900HT Sequence Detection System (Applied Biosystems, Foster City, Calif.) in the 384-well format according to manufacturer's instructions. The levels of mRNA were normalized to the amount of 18S RNA detected in each sample using the Eukaryotic 18S rRNA Endogenous Control from Applied Biosystems. Levels of the target mRNAs in treated cells were calculated relative to the untreated cells.

[0169] Table 10 shows the Taqman assay results for five cortisone signature genes obtained using cortisone and forskolin alone and in combination with HSD1 inhibitor compound 3-(2-chlorophenyl)-4-methyl-5-(4-pentylbicyclo[2.2.2]oct-1-yl)-4H-1,2,4-triazole and four other test agents.

TABLE 10
Cortisone signature genes measured by RT-PCR.

| | Gene Transcript Measured | | | | | |
|---|---|---|---|---|---|---|
| | (Fold Change Relative to Vehicle Alone) | | | | | |
| | | | | | | Average |
| | | | | | | of five |
| Compound Treatment | Homer-2 | G6PC | PGC | TAT | LIPG | genes |
| Cortisone/Forskolin (CF) | 18 | 2.8 | 27 | 5.8 | 2.9 | 11.3 |
| CF plus Compound 7 [404′] | 14.7 | 2.4 | 28 | 6.8 | 3.3 | 11.0 |
| CF plus Compound 8 [851′] | 5.8 | 2.2 | 8.0 | 4.2 | 5.4 | 5.1 |
| CF plus Compound 9 [051′] | 2.0 | 1.6 | 2.5 | 3.0 | 2.2 | 2.7 |
| CF plus Compound 10 [400′] | 1.1 | 0.8 | 0.8 | 1.2 | 1.4 | 1.1 |
| CF plus 3-(2-chlorophenyl)-4- | 1.5 | 1.0 | 0.7 | 1.2 | 2.7 | 1.4 |
| methyl-5-(4- | | | | | | |
| pentylbicyclo[2.2.2]oct-1-yl)- | | | | | | |
| 4H-1,2,4-triazole | | | | | | |
| CF plus Compound 11 [750′] | 1.1 | 1.2 | 0.5 | 1.0 | 1.0 | 0.96 |

[0170] The results in Table 10 show that the various HSD1 inhibitors can be compared to each other based upon the changes in gene expression caused by each compound as compared to the Cortisone/Forskolin treated cells alone either on a gene by gene basis or by averaging across all five genes. For example, based upon these results it is apparent that Compound 7 is not as strong of an HSD1 inhibitor as compared to the other compounds tested in this experiment because it does not strongly reverse the gene expression levels measured for the cortisone/forskolin alone treatment. In contrast, Compounds 10 and 11 are strong HSD1 inhibitor agents as is reflected in the almost total reversal in the expression levels measured for these five cortisone signature genes as compared to the cortisone/forskolin alone treatment.

[0171] Table 11 shows the Taqman assay results for five off-target signature genes obtained using forskolin treatment alone and in combination with HSD1 inhibitor compound 3-(2-chlorophenyl)-4-methyl-5-(4-pentylbicyclo[2.2.2]oct-1-yl)-4H-1,2,4-triazole and four other test HSD1 inhibitor compounds.

TABLE 11
Off-target signature genes measured by RT-PCR.

| | Gene Transcript Measured | | | | | |
|---|---|---|---|---|---|---|
| | (Fold Change Relative to Vehicle Alone) | | | | | |
| | | | | | | Average |
| | | | | | | of five |
| Compound Treatment | SCD | DHCR7 | ACLY | FBXO9 | HEY1 | genes |
| Forskolin plus 3-(2- | 2.3 | 2.2 | 2.2 | 0.9 | 0.9 | 1.7 |
| chlorophenyl)-4-methyl-5-(4- | | | | | | |
| pentylbicyclo[2.2.2] oct-1-yl)- | | | | | | |
| 4H-1,2,4-triazole | | | | | | |
| CF plus Compound 8 [851′] | 1.8 | 2.6 | 2.7 | 0.8 | 0.7 | 1.7 |
| CF plus Compound 9 [051′] | 1.2 | 1.2 | 0.9 | 1.6 | 1.2 | 1.5 |
| CF plus Compound 11 [750′] | 1.3 | 1.4 | 1.0 | 2.3 | 1.3 | 1.46 |
| Forskolin plus Compound 7 | 1.3 | 1.5 | 1.1 | 1.2 | 1.0 | 1.2 |
| [404′] | | | | | | |
| CF plus Compound 10 [400′] | 1.1 | 1.1 | 0.9 | 1.3 | 0.8 | 1.0 |

[0172] The results in Table 11 show that the various HSD1 inhibitors can be compared to each other and rank ordered based upon the changes in gene expression caused by each compound as compared to the cells treated with an HSD1 inhibitor known to induce changes in gene expression of many off-target gene, e.g., 3-(2-chlorophenyl)-4-methyl-5-(4-pentylbicyclo[2.2.2]oct-1-yl)-4H-1,2,4-triazole. The HSD1 inhibitor compounds may be compared using each single gene measurement, i.e., on a gene by gene basis, or by averaging the fold change in expression levels across all five off-target genes. For example, based upon these results it is apparent that Compound 8 has a high level of off-target effects as compared to Compounds 7 and 10. However, as is apparent from the data in Table 10, Compound 7 is a poor inhibitor of HSD1, while Compound 10 has high inhibitor activity, but low off-target effects.

### REFERENCES CITED

[0173] All references cited herein are incorporated herein by reference in their entirety and for all purposes to the same extent as if each individual publication or patent or patent application was specifically and individually indicated to be incorporated by reference in its entirety for all purposes.

[0174] Many modifications and variations of the present invention can be made without departing from its spirit and scope, as will be apparent to those skilled in the art. The specific embodiments described herein are offered by way of example only, and the invention is to be limited only by the terms of the appended claims along with the full scope of equivalents to which such claims are entitled.

The application's sequence listing, which the Patent Office published only in electronic form, follows.

SEQUENCE LISTING (863 sequences)

SEQ ID NO: 1 - DNA, 1405 bp, Homo sapiens
acaattcagaggctgctgcctgcttaggaggttgtagaaagctctgtaggttctctctgtgtgtcctacaggagtcttcaggccagctccctgtcggatggcttttatgaaaaaatatctcctccccattctggggctcttcatggcctactactactattctgcaaacgaggaattcagaccagagatgctccaaggaaagaaagtgattgtcacaggggccagcaaagggatcggaagagagatggcttatcatctggcgaagatgggagcccatgtggtggtgacagcgaggtcaaaagaaactctacagaaggtggtatcccactgcctggagcttggagcagcctcagcacactacattgctggcaccatggaagacatgaccttcgcagagcaatttgttgcccaagcaggaaagctcatgggaggactagacatgctcattctcaaccacatcaccaacacttctttgaatctttttcatgatgatattcaccatgtgcgcaaaagcatggaagtcaacttcctcagttacgtggtcctgactgtagctgccttgcccatgctgaagcagagcaatggaagcattgttgtcgtctcctctctggctgggaaagtggcttatccaatggttgctgcctattctgcaagcaagtttgctttggatgggttcttctcctccatcagaaaggaatattcagtgtccagggtcaatgtatcaatcactctctgtgttcttggcctcatagacacagaaacagccatgaaggcagtttctgggatagtccatatgcaagcagctccaaaggaggaatgtgccctggagatcatcaaagggggagctctgcgccaagaagaagtgtattatgacagctcactctggaccactcttctgatcagaaatccatgcaggaagatcctggaatttctctactcaacgagctataatatggacagattcataaacaagtaggaactccctgagggctgggcatgctgagggattttgggactgttctgtctcatgtttatctgagctcttatctatgaagacatcttcccagagtgtccccagagacatgcaagtcatgggtcacacctgacaaatggaaggagttcctctaacatttgcaaaatggaaatgtaataataatgaatgtcatgcaccgctgcagccagcagttgtaaaattgttagtaaacataggtataattaccagatagttatattaaatttatatcttatatataataatatgtgatgattaatacaatattaattataataaaggtcacataaactttataaattcataactggtagctataacttgagcttattcaggatggtttctttaaaaccataaactgtacaaatgaaatttttcaatatttgtttctta

SEQ ID NO: 2 - protein, 292 aa, Homo sapiens
MAFMKKYLLPILGLFMAYYYYSANEEFRPEMLQGKKVIVTGASKGIGREMAYHLAKMGAHVVVTARSKETLQKVVSHCLELGAASAHYIAGTMEDMTFAEQFVAQAGKLMGGLDMLILNHITNTSLNLFHDDIHHVRKSMEVNFLSYVVLTVAALPMLKQSNGSIVVVSSLAGKVAYPMVAAYSASKFALDGFFSSIRKEYSVSRVNVSITLCVLGLIDTETAMKAVSGIVHMQAAPKEECALEIIKGGALRQEEVYYDSSLWTTLLIRNPCRKILEFLYSTSYNMDRFINK

SEQ ID NO: 3 - protein, 291 aa, Pan troglodytes
MAFMKKYLLPILGLFMAYYYYSANEEFRPEMLQGKKVIVTGASKGIGREMAYHLAKMGAHVVVTARSKETLQKVVSHCLELGAASAHYIAGTMEDMTFAEQFVAQAGKLMGLDMLILNHITNTSLNLFHDDIHHVRKSMEVNFLSYVVLTVAALPMLKQSNGSIVVVSSLAGKVAYPMVAAYSASKFALDGFFSSIRKEYSVSKVNVSITLCVLGLIDTETAMKAVSGIVHMQAAPKEECALEIIKGGALRQEEVYYDSSLWTTLLIRNPCRKILEFLYSTSYNMDRFINK

SEQ ID NO: 4 - DNA, 1219 bp, Pan troglodytes
atggcttttatgaaaaaatatctcctccccattctggggctcttcatggcctactactactattctgcaaacgaggaattcagaccagagatgctccaaggaaagaaagtgattgtcacaggggccagcaaagggatcggaagagagatggcttatcatctggcgaagatgggagcccatgtggtggtgacagcgaggtcaaaagaaactctacagaaggtggtatcccactgcctggagcttggagcagcctcagcacactacattgctggcaccatggaagacatgaccttcgcagagcaatttgttgcccaagcaggaaagctcatgggactagacatgctcattctcaaccacatcaccaacacttctttgaatctttttcatgatgatattcaccatgtgcgcaaaagcatggaagtcaacttcctcagttacgtggtcctgactgtagctgccttgcccatgctgaagcagagcaatggaagcattgttgtcgtctcctctctggctgggaaagtggcttatccaatggttgctgcctattctgcaagcaagtttgctttggatgggttcttctcctccatcagaaaggaatattcagtgtccaaggtcaatgtatcaatcactctctgtgttcttggcctcatagacacagaaacagccatgaaggcagtttctgggatagtccatatgcaagcagctccaaaggaggaatgtgccctggagatcatcaaagggggagctctgcgccaagaagaagtgtattatgacagctcactctggaccactcttctgatcagaaatccatgcaggaagatcctggaatttctctactcaacgagctataatatggacagattcataaacaagtaggaactccctgagggctgggcatgctgagggattttgggactgttctgtctcatgtttatctgagctcttatctatgaagacatcttcccagagtgtccccagagacatgcaagtcatgggtcacacctgacaaatggaaggagttcctctaacatttgcaaaatggaaatgtaataataatgaatgtcatgcaccgctgcagccagcagttgtaaaattgttagtaaacataggtataattaccagatagttatattaaatttatatcttatatataataatatgtgatgattaatacaatattaattataataaaggtcacataaactttataaattcataa

SEQ ID NO: 5 - protein, 288 aa, Rattus norvegicus
MKKYLLPVLVLCLGYYYSTNEEFRPEMLQGKKVIVTGASKGIGREMAYHLSKMGAHVVLTARSEEGLQKVVSRCLELGAASAHYIAGTMEDMAFAERFVVEAGKLLGGLDMLILNHITQTTMSLFHDDIHSVRRSMEVNFLSYVVLSTAALPMLKQSNGSIAIISSMAGKMTQPLIASYSASKFALDGFFSTIRKEHLMTKVNVSITLCVLGFIDTETALKETSGIILSQAAPKEECALEIIKGTVLRKDEVYYDKSSWTPLLLGNPGRRIMEFLSLRSYNRDLFVSN

SEQ ID NO: 6 - DNA, 1585 bp, Rattus norvegicus
caaaggatgtctcggtaggagatgctcaggaacccagccctgcacagtcatgagcctggccatctggaagttgcctcttactcaatgaaatggagtaaacattgtccattatgaaatccatcacgcaggctgccagggacgaatgggatcccacccaaagccaatcattgctctgacagggaagttggctagtgctgcctgagactactccagcctcccccgtccctgatgtcacaattcagaggctgctgcctgcctgggaggttgtagaaagagctgcaggttttctttgtgtgtcctacagagctccctgagccaggtccctgttggacggcagttatgaaaaaatacctcctccccgtcctggtgctctgcctgggttactactattctacaaatgaagagttcagaccagaaatgctccaggggaagaaagtgattgtcactggggccagcaaagggatcggaagagaaatggcatatcatctgtcaaaaatgggagcccatgtggtattgactgcaaggtcggaggaagggctccagaaggtggtgtctcgctgccttgaactcggagcagcctctgctcactatattgccggcactatggaagacatggcttttgcagagcgatttgttgttgaggcaggaaagctcttgggtggactggacatgctcattctcaatcacatcacacagaccactatgtctctcttccacgatgatatccactctgtgcgaagaagcatggaggtcaacttcctcagctatgtggtcctgagcacagcagccttgcccatgctgaaacagagcaatggcagcattgccatcatctcctccatggctgggaaaatgacccaacctctgattgcttcctactctgcaagcaagtttgctctggatgggttcttttccaccattagaaaagaacacttgatgaccaaggtcaacgtgtccatcactctctgtgtcctcggcttcatagacacagaaacagctttgaaagaaacctctgggataatcttgagtcaagctgctcccaaggaggaatgcgccctggagatcatcaaaggcacagttctgcgcaaagatgaggtatactatgacaaatcatcttggactccacttctgcttgggaatccaggaaggaggatcatggaatttctttcattacggtcatataacagggacctatttgtaagcaactaggaactcctgaggcctggtgaagggtcttggaacagtcctgcctgatatttctgtgagccctacccacaaatttctatgagcccctttccagagatacacaaattttggggtacacctcaccatgagaaattcttgcaacacttgcacagtaaaaatgtaattgtaataaatgtcacaaaccactttgtagcctgcagttgtgaacttgattgtaactatggatttaagcacacagttgtatcaattttacctcatacagaatgaaacaatgatgcctaatgtaacattaaataaaataaaggtaatatcaactctataaattcaaaaaaaaaaaaaaaaaaaaaaaaaaaaaaaaaaaaaaaaaaaaaaaaaaaaaaaa

SEQ ID NO: 7 - protein, 292 aa, Mus musculus
MAVMKNYLLPILVLSLAYYYYSTNEEFRPEMLQGKKVIVTGASKGIGREMAYHLSKMGAHVVLTARSEEGLQKVVSRCLELGAASAHYIAGTMEDMTFAEQFIVKAGKLMGGLDMLILNHITQTSLSLFHDDIHSVRRVMEVNFLSYVVMSTAALPMLKQSNGSIAVISSLAGKMTQPMIAPYSASKFALDGFFSTIRTELYITKVNVSITLCVLGLIDTETAMKEISGIIDALASPKEECALEIIKGTALRKSEVYYDKLPLTPILLGNPGRKIMEFFSLRYYNKDMFVSN

SEQ ID NO: 8 - DNA, 1350 bp, Mus musculus
ggatgagacagaaggatagagaggaggagagagagagagagaagagaagcaaccagaaataggcagccaataaaaaggagccgcacttatctgaagcctcaaggggcctgagccaggtccctgtttgatggcagttatgaaaaattacctcctcccgatcctggtgctctccctggcctactactactattctacaaatgaagagttcagaccagaaatgctccagggaaagaaagtgattgtcactggggccagcaaagggattggaagagaaatggcatatcatctgtcaaaaatgggagcccatgtggtattgactgccaggtcggaggaaggtctccagaaggtagtgtctcgctgccttgaactcggagcagcctctgctcactacattgctggcactatggaagacatgacatttgcggagcaatttattgtcaaggcgggaaagctcatgggcggactggacatgcttattctaaaccacatcactcagacctcgctgtctctcttccatgacgacatccactctgtgcgaagagtcatggaggtcaacttcctcagctacgtggtcatgagcacagccgccttgcccatgctgaagcagagcaatggcagcattgccgtcatctcctccttggctgggaaaatgacccagcctatgattgctccctactctgcaagcaagtttgctctggatgggttcttttccaccattagaacagaactctacataaccaaggtcaacgtgtccatcactctctgtgtccttggcctcatagacacagaaacagctatgaaggaaatctctgggataattgacgccctagcttctcccaaggaggagtgcgccctggagatcatcaaaggcacagctctacgcaaaagcgaggtgtactatgacaaattgcctttgactccaatcctgcttgggaacccaggaaggaagatcatggaatttttttcattacgatattataataaggacatgtttgtaagtaactaggaactcctgagccctggtgagtggtcttagaacagtcctgcctcatacttcagtaagccctacccacaaaagtatctttccagagatacacaaattttggggtacacctcatcatgagaaattcttgcaacacttgcacagtgaaaatgtaattgtaataaatgtcacaaaccactttgggcctgcagttgtgaacttgattgtaactatggatataaacacatagtggttgtatcggctttacctcacactgaatgaaacaatgataactaatgtaacattaaatataataaaggtaatatcaacttcgtaaatgcaaaaaaaaaaaaaaaaaaaaaaaaaaa

SEQ ID NO: 9 - protein, 293 aa, Canis familiaris
MAFKKKYLPPLLGFFLAYYYYSANEEFRPEMLQGKKVIVTGASKGIGEQMAYHLAKMGAHVVVTARSKETLKKVVSHCLELGAASAHYIPGTMEDMTFAEQFVAKAGKLMGGLDMLILNHITNTSMNLFSGDIHLVRRSMEVNFLSYVVLSAAALPMLKQSNGSIVVVSSKAGKMSSPLVAPYSASKFALDGFFSSVRMEHSVTKVNVSITLCILGLINTDTAMKAVSGILSTVGASSKEECALEIIKGGALRQEEVYYDNSVWTAFLLGNPGRKILEFLSLRSYKLDKFINN

SEQ ID NO: 10 - DNA, 882 bp, Canis familiaris
atggcttttaagaaaaaatatctccccccccttctggggttcttcttggcctactactactattctgcgaatgaggaattcagaccagagatgctccaaggaaagaaagtaattgtcacaggggccagcaaggggattggagaacagatggcctatcatctggcgaagatgggagcccatgtggtggtgacagcaaggtctaaagaaactctaaagaaggtggtatcccactgcctagagcttggggcagcatctgcacactacattcctggcaccatggaggatatgaccttcgcagagcaattcgtggccaaagctggaaagctcatggggggactagacatgctcatcctaaaccatatcaccaacacttctatgaatctatttagtggtgatatccacttggtgcgcagaagcatggaagtcaacttcctcagttatgtggtcctgagtgctgctgccttgcctatgctgaagcagagcaacggaagcattgttgtcgtctcctcaaaggctgggaaaatgtcttctccacttgttgcaccctattctgcaagcaaatttgctctggacggatttttctcctctgtcaggatggaacattcagtgaccaaggtcaatgtgtcgatcactctctgtatcctcggcctcataaacacagacacagccatgaaggccgtttctgggatactcagcacagtaggagcatcttcaaaggaagaatgtgccctggagatcatcaaagggggagctctgcgccaagaggaagtgtactatgacaactcagtctggacagctttcctactgggaaatccagggaggaagatcctggaattcttgtcattaagaagttataaactggacaaatttataaacaactaa

SEQ ID NO: 11 - protein, 777 aa, Homo sapiens
MDSKESLTPGREENPSSVLAQERGDVMDFYKTLRGGATVKVSASSPSLAVASQSDSKQRRLLVDFPKGSVSNAQQPDLSKAVSLSMGLYMGETETKVMGNDLGFPQQGQISLSSGETDLKLLEESIANLNRSTSVPENPKSSASTAVSAAPTEKEFPKTHSDVSSEQQHLKGQTGTNGGNVKLYTTDQSTFDILQDLEFSSGSPGKETNESPWRSDLLIDENCLLSPLAGEDDSFLLEGNSNEDCKPLILPDTKPKIKDNGDLVLSSPSNVTLPQVKTEKEDFIELCTPGVIKQEKLGTVYCQASFPGANIIGNKMSAISVHGVSTSGGQMYHYDMNTASLSQQQDQKPIFNVIPPIPVGSENWNRCQGSGDDNLTSLGTLNFPGRTVFSNGYSSPSMRPDVSSPPSSSSTATTGPPPKLCLVCSDEASGCHYGVLTCGSCKVFFKRAVEGQHNYLCAGRNDCIIDKIRRKNCPACRYRKCLQAGMNLEARKTKKKIKGIQQATTGVSQETSENPGNKTIVPATLPQLTPTLVSLLEVIEPEVLYAGYDSSVPDSTWRIMTTLNMLGGRQVIAAVKWAKAIPGFRNLHLDDQMTLLQYSWMFLMAFALGWRSYRQSSANLLCFAPDLIINEQRMTLPCMYDQCKHMLYVSSELHRLQVSYEEYLCMKTLLLLSSVPKDGLKSQELFDEIRMTYIKELGKAIVKREGNSSQNWQRFYQLTKLLDSMHEVVENLLNYCFQTFLDKTMSIEFPEMLAEIITNQIPKYSNGNIKKLLFHQK

SEQ ID NO: 12 - DNA, 1972 bp, Homo sapiens
cgcgcctggcggcggtggcggcagtggcagcagtggcagccgcgcagccccgcggaatggagcggcgccggggctgagccgggcgcgcacgggccgccgcatgtgccgcgcggggagcggctgccgagcgggcggagagcgagcgcgagaggccccgtcggagcggccgccggagcagcgccggagatgggagaacagcccatcttcaccacccgagcgcatgtcttccagattgaccccaacaccaagaagaactggatgcctgcgagcaagcaggcggtcaccgtttcctacttctatgatgtcacaaggaacagctatcggatcatcagtgtggacggagccaaggtgatcataaacagcacaatcacaccgaatatgaccttcaccaaaacgtcacagaagtttgggcagtgggccgacagcagagccaacacagtgtttggtttggggttttcctctgagcagcagctgacaaagtttgcagagaaattccaggaggtgaaagaagctgccaagatagccaaagacaagacgcaggagaaaatcgagacctcaagtaatcattcccaagcatccagtgtcaacgggacggacgatgaaaaggcctctcacgccggtccagccaacacacacctgaagtctgagaatgacaagctgaagattgccttgacgcagagcgcagccaacgtgaagaagtgggagatcgagctgcagacccttcgggagagcaatgcacggctgaccacagcactgcaggagtcggcagccagtgtggagcagtggaagaggcagttctccatctgccgtgatgagaatgaccggctccgcaacaagattgatgagctggaagaacaatgcagtgagatcaacagagagaaggagaagaacacgcagctgaagaggaggatcgaggagctggaggcagagctccgagaaaaggagacagagctgaaagatctccgaaaacaaagtgaaatcatacctcagctcatgtcagagtgcgaatatgtctctgagaagctagaggcggcagagagagacaatcaaaacctggaagacaaagtgcgttccttaaagacagacattgaggagagcaaataccgacagcgccacctgaaggtggagttgaagagcttcctggaggtgctggacgggaagattgacgacctgcatgacttccgccgagggctctccaagctgggcaccgataactagggctggccgaggcccaggccccgcccgtgagtcccaagcgtgtgtgcgagaccagatagctctaggacgttcttctgtgtgcattgcttctgtaaatgcaggcgcagtttgtcgtgtttccaaaccagttgtgccgtccactcactccttttcagaatagaaatctcctctcgcttctctggccttgtgaggttgtggacaactggaagattctgactcaggaatccagaactaggtctaccttcaacatttatgcagtcagggcagggatgtttatatctttcataagggctgttgcaaccatatgaactgaaaaaacacgcattttgtaatccaaatattgatattctttacaccaagccatcaggctccttttatcaaatagcattcagagtatttgaatgtccaccagacaccagccccggggggcacagagagaacaacattcctctctgtcaacatcgagaggctttaaaacaactgtttagtggaaactttctgagagatggaaaacaagcttctggtgggtgcattttctggcccggagttgcctgcatccacgctactgccccctgccccccgcccccccagtttgtacggttgcaacagtgttccttttcttggttttaatttctgagcagatgattgtgctgtgggaacagcacacagtgagggtgcctagcacaatgtctggcacaaagtaggtgcttaataaatatttgttcaattaaaaaaaaaaaaaaaaaaaaaaaaa

SEQ ID NO: 13 - DNA, 2005 bp, Homo sapiens
cgcgcctggcggcggtggcggcagtggcagcagtggcagccgcgcagccccgcggaatggagcggcgccggggctgagccgggcgcgcacgggccgccgcatgtgccgcgcggggagcggctgccgagcgggcggagagcgagcgcgagaggccccgtcggagcggccgccggagcagcgccggagatgggagaacagcccatcttcaccacccgagcgcatgtcttccagattgaccccaacaccaagaagaactggatgcctgcgagcaagcaggcggtcaccgtttcctacttctatgatgtcacaaggaacagctatcggatcatcagtgtggacggagccaaggtgatcataaacagcacaatcacaccgaatatgaccttcaccaaaacgtcacagaagtttgggcagtgggccgacagcagagccaacacagtgtttggtttggggttttcctctgagcagcagctgacaaagtttgcagagaaattccaggaggtgaaagaagctgccaagatagccaaagacaagacgcaggagaaaatcgagacctcaagtaatcattcccaagaatctgggcgtgaaaccccatcttctactcaggcatccagtgtcaacgggacggacgatgaaaaggcctctcacgccggtccagccaacacacacctgaagtctgagaatgacaagctgaagattgccttgacgcagagcgcagccaacgtgaagaagtgggagatcgagctgcagacccttcgggagagcaatgcacggctgaccacagcactgcaggagtcggcagccagtgtggagcagtggaagaggcagttctccatctgccgtgatgagaatgaccggctccgcaacaagattgatgagctggaagaacaatgcagtgagatcaacagagagaaggagaagaacacgcagctgaagaggaggatcgaggagctggaggcagagctccgagaaaaggagacagagctgaaagatctccgaaaacaaagtgaaatcatacctcagctcatgtcagagtgcgaatatgtctctgagaagctagaggcggcagagagagacaatcaaaacctggaagacaaagtgcgttccttaaagacagacattgaggagagcaaataccgacagcgccacctgaaggtggagttgaagagcttcctggaggtgctggacgggaagattgacgacctgcatgacttccgccgagggctctccaagctgggcaccgataactagggctggccgaggcccaggccccgcccgtgagtcccaagcgtgtgtgcgagaccagatagctctaggacgttcttctgtgtgcattgcttctgtaaatgcaggcgcagtttgtcgtgtttccaaaccagttgtgccgtccactcactccttttcagaatagaaatctcctctcgcttctctggccttgtgaggttgtggacaactggaagattctgactcaggaatccagaactaggtctaccttcaacatttatgcagtcagggcagggatgtttatatctttcataagggctgttgcaaccatatgaactgaaaaaacacgcattttgtaatccaaatattgatattctttacaccaagccatcaggctccttttatcaaatagcattcagagtatttgaatgtccaccagacaccagccccggggggcacagagagaacaacattcctctctgtcaacatcgagaggctttaaaacaactgtttagtggaaactttctgagagatggaaaacaagcttctggtgggtgcattttctggcccggagttgcctgcatccacgctactgccccctgccccccgcccccccagtttgtacggttgcaacagtgttccttttcttggttttaatttctgagcagatgattgtgctgtgggaacagcacacagtgagggtgcctagcacaatgtctggcacaaagtaggtgcttaataaatatttgttcaattaaaaaaaaaaaaaaaaaaaaaaaaa

SEQ ID NO: 14 - DNA, 1808 bp, Homo sapiens
cgcgcctggcggcggtggcggcagtggcagcagtggcagccgcgcagccccgcggaatggagcggcgccggggctgagccgggcgcgcacgggccgccgcatgtgccgcgcggggagcggctgccgagcgggcggagagcgagcgcgagaggccccgtcggagcggccgccggagcagcgccggagatgggagaacagcccatcttcaccacccgagcgcatgtcttccagattgaccccaacaccaagaagaactggatgcctgcgagcaagcaggcggtcaccgtttcctacttctatgatgtcacaaggaacagctatcggatcatcagtgtggacggagccaaggtgatcataaacagcacaatcacaccgaatatgaccttcaccaaaacgtcacagaagtttgggcagtgggccgacagcagagccaacacagtgtttggtttggggttttcctctgagcagcagctgacaaagtttgcagagaaattccaggaggtgaaagaagctgccaagatagccaaagacaagacgcaggagaaaatcgagacctcaagtaatcattcccaagcatccagtgtcaacgggacggacgatgaaaaggcctctcacgccggtccagccaacacacacctgaagtctgagaatgacaagctgaagattgccttgacgcagagcgcagccaacgtgaagaagtgagatcaacagagagaaggagaagaacacgcagctgaagaggaggatcgaggagctggaggcagagctccgagaaaaggagacagagctgaaagatctccgaaaacaaagtgaaatcatacctcagctcatgtcagagtgcgaatatgtctctgagaagctagaggcggcagagagagacaatcaaaacctggaagacaaagtgcgttccttaaagacagacattgaggagagcaaataccgacagcgccacctgaaggtggagttgaagagcttcctggaggtgctggacgggaagattgacgacctgcatgacttccgccgagggctctccaagctgggcaccgataactagggctggccgaggcccaggccccgcccgtgagtcccaagcgtgtgtgcgagaccagatagctctaggacgttcttctgtgtgcattgcttctgtaaatgcaggcgcagtttgtcgtgtttccaaaccagttgtgccgtccactcactccttttcagaatagaaatctcctctcgcttctctggccttgtgaggttgtggacaactggaagattctgactcaggaatccagaactaggtctaccttcaacatttatgcagtcagggcagggatgtttatatctttcataagggctgttgcaaccatatgaactgaaaaaacacgcattttgtaatccaaatattgatattctttacaccaagccatcaggctccttttatcaaatagcattcagagtatttgaatgtccaccagacaccagccccggggggcacagagagaacaacattcctctctgtcaacatcgagaggctttaaaacaactgtttagtggaaactttctgagagatggaaaacaagcttctggtgggtgcattttctggcccggagttgcctgcatccacgctactgccccctgccccccgcccccccagtttgtacggttgcaacagtgttccttttcttggttttaatttctgagcagatgattgtgctgtgggaacagcacacagtgagggtgcctagcacaatgtctggcacaaagtaggtgcttaataaatatttgttcaattaaaaaaaaaaaaaaaaaaaaaaaaa

SEQ ID NO: 15 - DNA, 1841 bp, Homo sapiens
cgcgcctggcggcggtggcggcagtggcagcagtggcagccgcgcagccccgcggaatggagcggcgccggggctgagccgggcgcgcacgggccgccgcatgtgccgcgcggggagcggctgccgagcgggcggagagcgagcgcgagaggccccgtcggagcggccgccggagcagcgccggagatgggagaacagcccatcttcaccacccgagcgcatgtcttccagattgaccccaacaccaagaagaactggatgcctgcgagcaagcaggcggtcaccgtttcctacttctatgatgtcacaaggaacagctatcggatcatcagtgtggacggagccaaggtgatcataaacagcacaatcacaccgaatatgaccttcaccaaaacgtcacagaagtttgggcagtgggccgacagcagagccaacacagtgtttggtttggggttttcctctgagcagcagctgacaaagtttgcagagaaattccaggaggtgaaagaagctgccaagatagccaaagacaagacgcaggagaaaatcgagacctcaagtaatcattcccaagaatctgggcgtgaaaccccatcttctactcaggcatccagtgtcaacgggacggacgatgaaaaggcctctcacgccggtccagccaacacacacctgaagtctgagaatgacaagctgaagattgccttgacgcagagcgcagccaacgtgaagaagtgagatcaacagagagaaggagaagaacacgcagctgaagaggaggatcgaggagctggaggcagagctccgagaaaaggagacagagctgaaagatctccgaaaacaaagtgaaatcatacctcagctcatgtcagagtgcgaatatgtctctgagaagctagaggcggcagagagagacaatcaaaacctggaagacaaagtgcgttccttaaagacagacattgaggagagcaaataccgacagcgccacctgaaggtggagttgaagagcttcctggaggtgctggacgggaagattgacgacctgcatgacttccgccgagggctctccaagctgggcaccgataactagggctggccgaggcccaggccccgcccgtgagtcccaagcgtgtgtgcgagaccagatagctctaggacgttcttctgtgtgcattgcttctgtaaatgcaggcgcagtttgtcgtgtttccaaaccagttgtgccgtccactcactccttttcagaatagaaatctcctctcgcttctctggccttgtgaggttgtggacaactggaagattctgactcaggaatccagaactaggtctaccttcaacatttatgcagtcagggcagggatgtttatatctttcataagggctgttgcaaccatatgaactgaaaaaacacgcattttgtaatccaaatattgatattctttacaccaagccatcaggctccttttatcaaatagcattcagagtatttgaatgtccaccagacaccagccccggggggcacagagagaacaacattcctctctgtcaacatcgagaggctttaaaacaactgtttagtggaaactttctgagagatggaaaacaagcttctggtgggtgcattttctggcccggagttgcctgcatccacgctactgccccctgccccccgcccccccagtttgtacggttgcaacagtgttccttttcttggttttaatttctgagcagatgattgtgctgtgggaacagcacacagtgagggtgcctagcacaatgtctggcacaaagtaggtgcttaataaatatttgttcaattaaaaaaaaaaaaaaaaaaaaaaaaa

SEQ ID NO: 16 - protein, 343 aa, Homo sapiens
MGEQPIFTTRAHVFQIDPNTKKNWMPASKQAVTVSYFYDVTRNSYRIISVDGAKVIINSTITPNMTFTKTSQKFGQWADSRANTVFGLGFSSEQQLTKFAEKFQEVKEAAKIAKDKTQEKIETSSNHSQASSVNGTDDEKASHAGPANTHLKSENDKLKIALTQSAANVKKWEIELQTLRESNARLTTALQESAASVEQWKRQFSICRDENDRLRNKIDELEEQCSEINREKEKNTQLKRRIEELEAELREKETELKDLRKQSEIIPQLMSECEYVSEKLEAAERDNQNLEDKVRSLKTDIEESKYRQRHLKVELKSFLEVLDGKIDDLHDFRRGLSKLGTDN

SEQ ID NO: 17 - protein, 354 aa, Homo sapiens
MGEQPIFTTRAHVFQIDPNTKKNWMPASKQAVTVSYFYDVTRNSYRIISVDGAKVIINSTITPNMTFTKTSQKFGQWADSRANTVFGLGFSSEQQLTKFAEKFQEVKEAAKIAKDKTQEKIETSSNHSQESGRETPSSTQASSVNGTDDEKASHAGPANTHLKSENDKLKIALTQSAANVKKWEIELQTLRESNARLTTALQESAASVEQWKRQFSICRDENDRLRNKIDELEEQCSEINREKEKNTQLKRRIEELEAELREKETELKDLRKQSEIIPQLMSECEYVSEKLEAAERDNQNLEDKVRSLKTDIEESKYRQRHLKVELKSFLEVLDGKIDDLHDFRRGLSKLGTDN

SEQ ID NO: 18 - protein, 171 aa, Homo sapiens
MGEQPIFTTRAHVFQIDPNTKKNWMPASKQAVTVSYFYDVTRNSYRIISVDGAKVIINSTITPNMTFTKTSQKFGQWADSRANTVFGLGFSSEQQLTKFAEKFQEVKEAAKIAKDKTQEKIETSSNHSQASSVNGTDDEKASHAGPANTHLKSENDKLKIALTQSAANVKK

SEQ ID NO: 19 - protein, 182 aa, Homo sapiens
MGEQPIFTTRAHVFQIDPNTKKNWMPASKQAVTVSYFYDVTRNSYRIISVDGAKVIINSTITPNMTFTKTSQKFGQWADSRANTVFGLGFSSEQQLTKFAEKFQEVKEAAKIAKDKTQEKIETSSNHSQESGRETPSSTQASSVNGTDDEKASHAGPANTHLKSENDKLKIALTQSAANVKK

SEQ ID NO: 20 - DNA, 1366 bp, Homo sapiens
cgcagaactcagagctgctcttcctctgtggccagttggggaccagcatcatgaagtggatggtggtggtcttggtctgcctccagctcttggaggcagcagtggtcaaagtgcccctgaagaaatttaagtctatccgtgagaccatgaaggagaagggcttgctgggggagttcctgaggacccacaagtatgatcctgcttggaagtaccgctttggtgacctcagcgtgacctacgagcccatggcctacatggatgctgcctactttggtgagatcagcatcgggactccaccccagaacttcctggtcctttttgacaccggctcctccaacttgtgggtgccctctgtctactgccagagccaggcctgcaccagtcactcccgcttcaaccccagcgagtcgtccacctactccaccaatgggcagaccttctccctgcagtatggcagtggcagcctcaccggcttctttggctatgacaccctgactgtccagagcatccaggtccccaaccaggagttcggcttgagtgagaatgagcctggtaccaacttcgtctatgcgcagtttgatggcatcatgggcctggcctaccctgctctgtccgtggatgaggccaccacagctatgcagggcatggtgcaggagggcgccctcaccagccccgtcttcagcgtctacctcagcaaccagcagggctccagcgggggagcggttgtctttgggggtgtggatagcagcctgtacacggggcagatctactgggcgcctgtcacccaggaactctactggcagattggcattgaagagttcctcatcggcggccaggcctccggctggtgttctgagggttgccaggccatcgtggacacaggcacctctctgctaactgtgccccagcagtacatgagtgctcttctgcaggccacaggggcccaggaggatgagtatggacagtttctcgtgaactgtaacagcattcagaatctgcccagcttgaccttcatcatcaatggtgtggagttccctctgccaccttcctcctatatcctcagtaacaacggctactgcaccgtgggagtcgagcccacctacctgtcctcccagaacggccagcccctgtggatcctcggggatgtcttcctcaggtcctactattccgtctacgacttgggcaacaacagagtaggctttgccactgccgcctagacttgctgcctcgacacgtgggctcccctcttcctcttgaccctgcaccctcctagggcattgtatctgtctttccactctggattcagccttctttttctggactctggactttctctaataataaatagttcttctaaaaaaaaaaa

SEQ ID NO: 21 - protein, 388 aa, Homo sapiens
MKWMVVVLVCLQLLEAAVVKVPLKKFKSIRETMKEKGLLGEFLRTHKYDPAWKYRFGDLSVTYEPMAYMDAAYFGEISIGTPPQNFLVLFDTGSSNLWVPSVYCQSQACTSHSRFNPSESSTYSTNGQTFSLQYGSGSLTGFFGYDTLTVQSIQVPNQEFGLSENEPGTNFVYAQFDGIMGLAYPALSVDEATTAMQGMVQEGALTSPVFSVYLSNQQGSSGGAVVFGGVDSSLYTGQIYWAPVTQELYWQIGIEEFLIGGQASGWCSEGCQAIVDTGTSLLTVPQQYMSALLQATGAQEDEYGQFLVNCNSIQNLPSLTFIINGVEFPLPPSSYILSNNGYCTVGVEPTYLSSQNGQPLWILGDVFLRSYYSVYDLGNNRVGFATAA

SEQ ID NO: 22 - DNA, 3095 bp, Homo sapiens
tagcagagcaatcaccaccaagcctggaataactgcaagggctctgctgacatcttcctgaggtgccaaggaaatgaggatggaggaaggaatgaatgttctccatgactttgggatccagtcaacacattacctccaggtgaattaccaagactcccaggactggttcatcttggtgtccgtgatcgcagacctcaggaatgccttctacgtcctcttccccatctggttccatcttcaggaagctgtgggcattaaactcctttgggtagctgtgattggagactggctcaacctcgtctttaagtggattctctttggacagcgtccatactggtgggttttggatactgactactacagcaacacttccgtgcccctgataaagcagttccctgtaacctgtgagactggaccagggagcccctctggccatgccatgggcacagcaggtgtatactacgtgatggtcacatctactctttccatctttcagggaaagataaagccgacctacagatttcggtgcttgaatgtcattttgtggttgggattctgggctgtgcagctgaatgtctgtctgtcacgaatctaccttgctgctcattttcctcatcaagttgttgctggagtcctgtcaggcattgctgttacagaaactttcagccacatccacagcatctataatgccagcctcaagaaatattttctcattaccttcttcctgttcagcttcgccatcggattttatctgctgctcaagggactgggtgtagacctcctgtggactctggagaaagcccagaggtggtgcgagcagccagaatgggtccacattgacaccacaccctttgccagcctcctcaagaacctgggcacgctctttggcctggggctggctctcaactccagcatgtacagggagagctgcaaggggaaactcagcaagtggctcccattccgcctcagctctattgtagcctccctcgtcctcctgcacgtctttgactccttgaaacccccatcccaagtcgagctggtcttctacgtcttgtccttctgcaagagtgcggtagtgcccctggcatccgtcagtgtcatcccctactgcctcgcccaggtcctgggccagccgcacaagaagtcgttgtaagagatgtggagtcttcggtgtttaaagtcaacaaccatgccagggattgaggaggactactatttgaagcaatgggcactggtatttggagcaagtgacatgccatccattctgccgtcgtggaattaaatcacggatggcagattggagggtcgcctggcttattcccatgtgtgactccagcctgccctcagcacagactctttcagatggaggtgccatatcacgtacaccatatgcaagtttcccgccaggaggtcctcctctctctacttgaatactctcacaagtagggagctcactcccactggaacagcccattttatctttgaatggtcttctgccagcccattttgaggccagaggtgctgtcagctcaggtggtcctcttttacaatcctaatcatattgggtaatgtttttgaaaagctaatgaagctattgagaaagacctgttgctagaagttgggttgttctggattttcccctgaagacttacttattcttccgtcacatatacaaaagcaagacttccaggtagggccagctcacaagcccaggctggagatcctaactgagaattttctacctgtgttcattcttaccgagaaaaggagaaaggagctctgaatctgataggaaaagaaggctgcctaaggaggagtttttagtatgtggcgtatcatgcaagtgctatgccaagccatgtctaaatggctttaattatatagtaatgcactctcagtaatgggggaccagcttaagtataattaatagatggttagtggggtaattctgcttctagtattttttttactgtgcatacatgttcatcgtatttccttggatttctgaatggctgcagtgacccagatattgcactaggtcaaaacattcaggtatagctgacatctcctctatcacattacatcatcctccttataagcccagctctgctttttccagattcttccactggctccacatccaccccactggatcttcagaaggctagagggcgactctggtggtgcttttgtatgtttcaattaggctctgaaatcttgggcaaaatgacaaggggagggccaggattcctctctcaggtcactccagtgttacttttaattcctagagggtaaatatgactcctttctctatcccaagccaaccaagagcacattcttaaaggaaaagtcaacatcttctctctttttttttttttttgagacagggtctcactatgttgcccaggctgctcttgaattcctgggctcaagcagtcctcccaccctaccacagcgtcccgcgtagctggcatacaggtgcaagccactatgtccagctagccaactcctccttgcctgcttttctttttttttctttttttgagacggcgcacctatcacccaggctggagtggagtggcacgatcttggctcactgcaacctcttcctcctggttcaagcgattctcatgtctcagcctcctcagtagctaggactaccggcgtgcaccaccatgccaggctaatttttatatttttagaattttagaagagatgggatttcatcatgttggccaggctggtctcgaactcctgacctcaagtgatccacctgccttggcctcccaaggtgctaggattacaggcatgagccaccgcaccgggccctccttgcctgtttttcaatctcatctgatatgcagagtatttctgccccacccacctaccccccaaaaaaagctgaagcctatttatttgaaagtccttgtttttgctactaattatatagtataccatacattatcattcaaaacaaccatcctgctcataacatctttgaaaagaaaaatatatatgtgcagtattttattaaagcaacattttatttaagaataaagtcttgttaattactatattttagatgcaatgtgatc

SEQ ID NO: 23 - protein, 357 aa, Homo sapiens
MEEGMNVLHDFGIQSTHYLQVNYQDSQDWFILVSVIADLRNAFYVLFPIWFHLQEAVGIKLLWVAVIGDWLNLVFKWILFGQRPYWWVLDTDYYSNTSVPLIKQFPVTCETGPGSPSGHAMGTAGVYYVMVTSTLSIFQGKIKPTYRFRCLNVILWLGFWAVQLNVCLSRIYLAAHFPHQVVAGVLSGIAVTETFSHIHSIYNASLKKYFLITFFLFSFAIGFYLLLKGLGVDLLWTLEKAQRWCEQPEWVHIDTTPFASLLKNLGTLFGLGLALNSSMYRESCKGKLSKWLPFRLSSIVASLVLLHVFDSLKPPSQVELVFYVLSFCKSAVVPLASVSVIPYCLAQVLGQPHKKSL

SEQ ID NO: 24 - DNA, 2754 bp, Homo sapiens
attgcccctgtaacctgtcaaagaagagctaagggagctttcggggttggcttcttggaggctgctttctcctttacttggaaggcttcgctagtgatggacccatacatgattcagatgagcagcaaaggcaacctcccctcaattctggacgtgcatgtcaacgttggtgggagaagctctgtgccgggaaaaatgaaaggcagaaaggccaggtggtctgtgaggccctcagacatggccaagaaaactttcaaccccatccgagccattgtggacaacatgaaggtgaaaccaaatccaaacaaaaccatgatttccctgtccattggggaccctactgtgtttggaaacctgcctacagaccctgaagttacccaggcaatgaaagatgccctggactcgggcaaatataatggctatgccccatccatcggcttcctatccagtcgggaggagattgcttcttattaccactgtcctgaggcacccctagaagctaaggacgtcattctgacaagtggctgcagccaagctattgacctttgtttagctgtgttggccaacccagggcagaacatcctggttccaagacctggtttctctctctacaagactctggctgagtctatgggaattgaggtcaaactctacaatttgttgccagagaaatcttgggaaattgacctgaaacaactggaatatctaattgatgaaaagacagcttgtctcattgtcaataatccatcaaacccctgtgggtcagtgttcagcaaacgtcatcttcagaagattctggcagtggctgcacggcagtgtgtccccatcttagctgatgagatctatggagacatggtgttttcggattgcaaatatgaaccactggccaccctcagcaccgatgtccccatcctgtcctgtggagggctggccaagcgctggctggttcctggctggaggttgggctggatcctcattcatgaccgaagagacatttttggcaatgagatccgagatgggctggtgaagctgagtcagcgcattttgggaccctgtaccattgtccagggagctctgaaaagcatcctatgtcgcaccccgggagagttttaccacaacactctgagcttcctcaagtccaatgctgatctctgttatggggcgttggctgccatccctggactccggccagtccgcccttctggggctatgtacctcatggttggaattgagatggaacatttcccagaatttgagaacgatgtggagttcacggagcggttagttgctgagcagtctgtccactgcctcccagcaacgtgctttgagtacccgaatttcatccgagtggtcatcacagtccccgaggtgatgatgctggaggcgtgcagccggatccaggagttctgtgagcagcactaccattgtgctgaaggcagccaggaggagtgtgataaataggcctgcatccattctcctgaggatgtgtcccatctagggaaggctggactaggccttgcggctcctcagggactcaggtggccctactgggagaggggcctcaaatgcaccatgtcaagggttcaagattgttcctgcttttccccaagtacaaccacacccacactcagatcctcctcattcacatcgcagattactcccttgctctgcgctgctagagtgactcactaattcattaatctgcctccctctcgtaagatttccttcttttttttcttgaaagtaccaggtgaacaaagtttaccagaaagcagttgagacaagaaaataagagctcaggatgagggaaaagaaaaagattgagagaatttgtgcccccaaccatttcctcagactctaagaaagaacacgctctctccaggcaggtctgaagctcaactctcttattgcctcacttcaggtatacctcactttacacaatagaattataactggaaagaagttggggacacatgtatttggtgattacattttaaacacattaggaaaagttgctatttgaactttttattgatttttggggggagtaaagaattattttggatgcaaataaatatcctttaattgatcgacttgccaaatttagatttgtgtgcatcaggctttcttttttttctttttttagagaagttcaatataagcttttcttttctttgtttctttctttctttattttgagatggagtcttgctctgtcgcccatgctggagtgcagtggcgcgatctcggctcactgcaacctccacctcctgggttcaagcgattctcttgcctcaacctcccaagcagttgggactacaggcgtgagccaccatgcccggctaatttttgtatttttagtagagacagggtttcaccatgttagccaggctggtctcaaactcctgacctcaggcaatctgcccgcctgggtctcctaaagtactgggattacaggcgtgagccacctcgcccagcggcatcaggctttcttaaagtgagagcacgcctgtactagagcaagcaggaatcagagaccttccagaaatactactgtgtaagggccagaaatatcttcacttgtcattgttatataatcattattacttttgctgtaatgttaatattgatttattaatatatattatcttttcatacattttctaagaaacatttatattgataagatcttttattttgcaagggcataaattattgtttttctttttttttttttaataaatttcaccaagt

SEQ ID NO: 25 - protein, 454 aa, Homo sapiens [sequence omitted]

SEQ ID NO: 26 - DNA, 4143 bp, Homo sapiens
agcagcgagtccttgcctcccggcggctcaggacgagggcagatctcgttctggggcaagccgttgacactcgctccctgccaccgcccgggctccgtgccgccaagttttcattttccaccttctctgcctccagtcccccagcccctggccgagagaagggtcttaccggccgggattgctggaaacaccaagaggtggtttttgttttttaaaacttctgtttcttgggagggggtgtggcggggcaggatgagcaactccgttcctctgctctgtttctggagcctctgctattgctttgctgcggggagccccgtaccttttggtccagagggacggctggaagataagctccacaaacccaaagctacacagactgaggtcaaaccatctgtgaggtttaacctccgcacctccaaggacccagagcatgaaggatgctacctctccgtcggccacagccagcccttagaagactgcagtttcaacatgacagctaaaacctttttcatcattcacggatggacgatgagcggtatctttgaaaactggctgcacaaactcgtgtcagccctgcacacaagagagaaagacgccaatgtagttgtggttgactggctccccctggcccaccagctttacacggatgcggtcaataataccagggtggtgggacacagcattgccaggatgctcgactggctgcaggagaaggacgatttttctctcgggaatgtccacttgatcggctacagcctcggagcgcacgtggccgggtatgcaggcaacttcgtgaaaggaacggtgggccgaatcacaggtttggatcctgccgggcccatgtttgaaggggccgacatccacaagaggctctctccggacgatgcagattttgtggatgtcctccacacctacacgcgttccttcggcttgagcattggtattcagatgcctgtgggccacattgacatctaccccaatgggggtgacttccagccaggctgtggactcaacgatgtcttgggatcaattgcatatggaacaatcacagaggtggtaaaatgtgagcatgagcgagccgtccacctctttgttgactctctggtgaatcaggacaagccgagttttgccttccagtgcactgactccaatcgcttcaaaaaggggatctgtctgagctgccgcaagaaccgttgtaatagcattggctacaatgccaagaaaatgaggaacaagaggaacagcaaaatgtacctaaaaacccgggcaggcatgcctttcagagtttaccattatcagatgaaaatccatgtcttcagttacaagaacatgggagaaattgagcccaccttttacgtcaccctttatggcactaatgcagattcccagactctgccactggaaatagtggagcggatcgagcagaatgccaccaacaccttcctggtctacaccgaggaggacttgggagacctcttgaagatccagctcacctgggagggggcctctcagtcttggtacaacctgtggaaggagtttcgcagctacctgtctcaaccccgcaaccccggacgggagctgaatatcaggcgcatccgggtgaagtctggggaaacccagcggaaactgacattttgtacagaagaccctgagaacaccagcatatccccaggccgggagctctggtttcgcaagtgtcgggatggctggaggatgaaaaacgaaaccagtcccactgtggagcttccctgagggtgcccgggcaagtcttgccagcaaggcagcaagacttcctgctatccaagcccatggaggaaagttactgctgaggacccacccaatggaaggattcttctcagccttgaccctggagcactgggaacaactggtctcctgtgatggctgggactcctcgcgggaggggactgcgctgctatagctcttgctgcctctcttgaatagctctaactccaaacctctgtccacacctccagagcaccaagtccagatttgtgtgtaagcagctgggtgcctggggcctctcgtgcacactggattggtttctcagttgctgggcgagcctgtactctgcctgacgaggaacgctggctccgaagaggccctgtgtagaaggctgtcagctgctcagcctgctttgagcctcagtgagaagtccttccgacaggagctgactcatgtcaggatggcaggcctggtatcttgctcgggccctagctgttggggttctcatgggttgcactgaccatactgcttacgtcttagccattccgtcctgctccccagctcactctctgaagcacacatcattggctttcctatttttctgttcattttttaattgagcaaatgtctattgaacacttaaaattaattagaatgtggtaatggacatattactgagcctctccatttggaacccagtggagttgggatttctagaccctctttctgtttggatggtgtatgtgtatatgcatggggaaaggcacctggggcctgggggaggctataggatataagcattagggaccctgaggctttaagtggtttctatttcttcttagttattatgtgccaccttcttagttattatgtgccacctcccctatgagtgacgtgtttgatcactagcagaatagcaagcagagtatcattcatgctggggccagaatgatggccggttgccagatataactgctttggagcaaatctcttctgtttagagagatagaagttatgacatatgtaatacacatctgtgtacacagaaaccggcacctgccagacagagctggttctaagatttaatacagtgctttttttcctctttgaaatattttactttaataccagtgccttttcttgttgaacttcttggaaaagccaccaattctagatcttgatttgaattaatacacacaatatctgagacacttacacttttcaaaagatttgtgtatgcattgcctaattagagtagggggagaagggcaactattattatccctattttacaaaactgaggcttagtgaggttcagccacatgcctagacttatatactagttagtggtgcagccagggagaggactcagatttcctggaggcaaagtctatctctgaaactccatgaagacttttgcagccagttcccaccaatatgccccagacgtgagacaaacaaggacttttttttttatatagagccatccataaaatcctaagcccttttattaatgtataaccaggagaacatctgtgccaacggttggactttttatggctgagattcgggaggaagtgtgacaccaagcaggagaggaagaatgattttctttgtacttaggttttctaaggacattgttttaatctgtatcgtgccaaagttgtatcactgttaaacttctgaagacataaccagttgagtcttatttcaagatatgttctcaagccaattgtgtgcttctcttgtttctgtgattgctttctagccaaagcgaagcttgtacaggttgagtatcccttatccaaaatgcttggaaccagaagtgtttcaaattttagattattttcagattttggaatgtttgcatatacataatgagatattttgggaataggacccgagcctaaacacaaaattcattgatgtgtcagttacaccttatccacatagcctgagggtaattttatacgatattttaaatagttgtgtacatgaagcatggtttgtggtaacttatgtgaggggttttcccattttttgtcttgttggtgctcaaaaagttttggattttggagcatttcggattttggatttttggattagggttgctcaacccatattattggctgtacatcctggtcacttctgacttctgtttttactaatggaagctttgcaaattgaattctcagtgagttgtatatttatacacctggcttgaagccttaattgtatataatgatgctttttaaaaaatgctatttggaagactatttatttctcgtgtatataatgtatataaaaaaatatggttagtgtttacctaaggttaaccaatttcaagattaaaatttttaaatagtaaaataataaaaaattataaagttcttaaaa

SEQ ID NO: 27 - protein, 500 aa, Homo sapiens
MSNSVPLLCFWSLCYCFAAGSPVPFGPEGRLEDKLHKPKATQTEVKPSVRFNLRTSKDPEHEGCYLSVGHSQPLEDCSFNMTAKTFFIIHGWTMSGIFENWLHKLVSALHTREKDANVVVVDWLPLAHQLYTDAVNNTRVVGHSIARMLDWLQEKDDFSLGNVHLIGYSLGAHVAGYAGNFVKGTVGRITGLDPAGPMFEGADIHKRLSPDDADFVDVLHTYTRSFGLSIGIQMPVGHIDIYPNGGDFQPGCGLNDVLGSIAYGTITEVVKCEHERAVHLFVDSLVNQDKPSFAFQCTDSNRFKKGICLSCRKNRCNSIGYNAKKMRNKRNSKMYLKTRAGMPFRVYHYQMKIHVFSYKNMGEIEPTFYVTLYGTNADSQTLPLEIVERIEQNATNTFLVYTEEDLGDLLKIQLTWEGASQSWYNLWKEFRSYLSQPRNPGRELNIRRIRVKSGETQRKLTFCTEDPENTSISPGRELWFRKCRDGWRMKNETSPTVELP

SEQ ID NO: 28 - DNA, 2597 bp, Homo sapiens
gagcagcgcgcgcaagcaggccaggggaaggtgggcgcaggtgaggggccgaggtgtgcgcaggactttagccggttgagaaggatcaagcaggcatttggagcacaggtgtctagaaacttttaaggggccggttcaagaaggaaaagttcccttctgctgtgaaactatttggcaagaggctggagggcccaatggctgcaaaattgcaacccaacattcccaaagccaagagtctagatggcgtcaccaatgacagaaccgcatctcaagggcagtggggccgtgcctgggaggtggactggttttcactggcgagcgtcatcttcctactgctgttcgcccccttcatcgtctactacttcatcatggcttgtgaccagtacagctgcgccctgaccggccctgtggtggacatcgtcaccggacatgctcggctctcggacatctgggccaagactccacctataacgaggaaagccgcccagctctataccttgtgggtcaccttccaggtgcttctgtacacgtctctccctgacttctgccataagtttctacccggctacgtaggaggcatccaggagggggccgtgactcctgcaggggttgtgaacaagtatcagatcaacggcctgcaagcctggctcctcacgcacctgctctggtttgcaaacgctcatctcctgtcctggttctcgcccaccatcatcttcgacaactggatcccactgctgtggtgcgccaacatccttggctatgccgtctccaccttcgccatggtcaagggctacttcttccccaccagcgccagagactgcaaattcacaggcaatttcttttacaactacatgatgggcatcgagtttaaccctcggatcgggaagtggtttgacttcaagctgttcttcaatgggcgccccgggatcgtcgcctggaccctcatcaacctgtccttcgcagcgaagcagcgggagctccacagccatgtgaccaatgccatggtcctggtcaacgtcctgcaggccatctacgtgattgacttcttctggaacgaaacctggtacctgaagaccattgacatctgccatgaccacttcgggtggtacctgggctggggcgactgtgtctggctgccttatctttacacgctgcagggtctgtacttggtgtaccaccccgtgcagctgtccaccccgcacgccgtgggcgtcctgctgctgggcctggtgggctactacatcttccgggtggccaaccaccagaaggacctgttccgccgcacggatgggcgctgcctcatctggggcaggaagcccaaggtcatcgagtgctcctacacatccgccgacgggcagaggcaccacagcaagctgctggtgtcgggcttctggggcgtggcccgccacttcaactacgtcggcgacctgatgggcagcctggcctactgcctggcctgtggcggtggccacctgctgccctacttctacatcatctacatggccatcctgctgacccaccgctgcctccgggacgagcaccgctgcgccagcaagtacggccgggactgggagcgctacaccgccgcagtgccttaccgcctgctgcctggaatcttctaagggcacgccctagggagaagccctgtggggctgtcaagagcgtgttctgccaggtccatgggggctggcatcccagctccaactcgaggagcctcagtttcctcatctgtaaactggagagagcccagcacttggcaggtgtccagtacctaatcacgctctgttccttgcttttgccttcaagggaattccgagtgtccagcactgccgtattgccagcacagacggattttctctaatcagtgtccctgggcaggaggatgacccagtcacctttactagtcctttggagacaatttacctgtattaggagcccaggccacgctacactctgcccacactggtgagcaggaggtcttcccacgccctgtcattaggctgcatttactcttgctaaataaaagtgggagtggggcgtgcgcgttatccatgtattgcctttcagctctagatccccctcccctgcctgctctgcagtcgtgggtggggcccgtgcgccgtttctccttggtagcgtgcacggtgttgaactgggacactggggagaaaggggctttcatgtcgtttccttcctgctcctgctgcacagctgccaggagtgctctgcctggagtctgcagacctcagagaggtcccagcactggctgtggctttcaggtgtaggcaggtgggctctgcttcccgattccctgtgagcgcccaccctctcgaaagaattttctgtcttgccctgtgactgtgcagactctggctcgagcaacccggggaacttcaccctcaggggcctctccacaccttctccagcgaggaggtctcagtcccagcctcgggagggcacctccttttctgtgctttcttccctgaggcattcttcctcatccctagggtgttgtgtagaactctttttaaactctatgctccgagtagagttcatctttatattaaacttcccctgttcaaaaaaaaaaaaaaaaa

SEQ ID NO: 29 - protein, 475 aa, Homo sapiens
MAAKLQPNIPKAKSLDGVTNDRTASQGQWGRAWEVDWFSLASVIFLLLFAPFIVYYFIMACDQYSCALTGPVVDIVTGHARLSDIWAKTPPITRKAAQLYTLWVTFQVLLYTSLPDFCHKFLPGYVGGIQEGAVTPAGVVNKYQINGLQAWLLTHLLWFANAHLLSWFSPTIIFDNWIPLLWCANILGYAVSTFAMVKGYFFPTSARDCKFTGNFFYNYMMGIEFNPRIGKWFDFKLFFNGRPGIVAWTLINLSFAAKQRELHSHVTNAMVLVNVLQAIYVIDFFWNETWYLKTIDICHDHFGWYLGWGDCVWLPYLYTLQGLYLVYHPVQLSTPHAVGVLLLGLVGYYIFRVANHQKDLFRRTDGRCLIWGRKPKVIECSYTSADGQRHHSKLLVSGFWGVARHFNYVGDLMGSLAYCLACGGGHLLPYFYIIYMAILLTHRCLRDEHRCASKYGRDWERYTAAVPYRLLPGIF

SEQ ID NO: 30 - DNA, 5543 bp, Homo sapiens
atgccggcccacttgctgcaggacgatatctctagctcctataccaccaccaccaccattacagcgcctcggcaggacgaggtggcaccaaattcccttcggccaatgacgagccggagtttacagaagcctcattagcatttccccagaggcaggggcaggggcagaggccgggtggtgtggtgtcggtgtcggcagcatccccggcgccctgctgcggtcgccgcgagcctcggcctctgtctcctccccctcccgcccttacctccacgcgggaccgcccgcgccagtcaactcctcgcactttgcccctgcttggcagcggataaaagggggctgaggaaataccggacacggtcacccgttgccagctctagcctttaaattcccggctcggggacctccacgcaccgcggctagcgccgacaaccagctagcgtgcaaggcgccgcggctcagcgcgtaccggcgggcttcgaaaccgcagtcctccggcgaccccgaactccgctccggagcctcagccccctggaaagtgatcccggcatccgagagccaagatgccggcccacttgctgcaggacgatatctctagctcctataccaccaccaccaccattacagcgcctccctccagggtcctgcagaatggaggagataagttggagacgatgcccctctacttggaagacgacattcgccctgatataaaagatgatatatatgaccccacctacaaggataaggaaggcccaagccccaaggttgaatatgtctggagaaacatcatccttatgtctctgctacacttgggagccctgtatgggatcactttgattcctacctgcaagttctacacctggctttggggggtattctactattttgtcagtgccctgggcataacagcaggagctcatcgtctgtggagccaccgctcttacaaagctcggctgcccctacggctctttctgatcattgccaacacaatggcattccagaatgatgtctatgaatgggctcgtgaccaccgtgcccaccacaagttttcagaaacacatgctgatcctcataattcccgacgtggctttttcttctctcacgtgggttggctgcttgtgcgcaaacacccagctgtcaaagagaaggggagtacgctagacttgtctgacctagaagctgagaaactggtgatgttccagaggaggtactacaaacctggcttgctgatgatgtgcttcatcctgcccacgcttgtgccctggtatttctggggtgaaacttttcaaaacagtgtgttcgttgccactttcttgcgatatgctgtggtgcttaatgccacctggctggtgaacagtgctgcccacctcttcggatatcgtccttatgacaagaacattagcccccgggagaatatcctggtttcacttggagctgtgggtgagggcttccacaactaccaccactcctttccctatgactactctgccagtgagtaccgctggcacatcaacttcaccacattcttcattgattgcatggccgccctcggtctggcctatgaccggaagaaagtctccaaggccgccatcttggccaggattaaaagaaccggagatggaaactacaagagtggctgagtttggggtccctcaggttcctttttcaaaaaccagccaggcagaggttttaatgtctgtttattaactactgaataatgctaccaggatgctaaagatgatgatgttaacccattccagtacagtattcttttaaaattcaaaagtattgaaagccaacaactctgcctttatgatgctaagctgatattatttcttctcttatcctctctctcttctaggcccattgtcctccttttcactttattgctatcgccctcctttcccttattgcctcccaggcaagcagctggtcagtctttgctcagtgtccagcttccaaagcctagacaacctttctgtagcctaaaacgaatggtctttgctccagataactctctttccttgagctgttgtgagctttgaagtaggtggcttgagctagagataaaacagaatcttctgggtagtcccctgttgattatcttcagcccaggcttttgctagatggaatggaaaagcaacttcatttgacacaaagcttctaaagcaggtaaattgtcgggggagagagttagcatgtatgaatgtaaggatgagggaagcgaagcaagaggaacctctcgccatgatcagacatacagctgcctacctaatgaggacttcaagccccaccacatagcatgcttcctttctctcctggctcggggtaaaaagtggctgcggtgtttggcaatgctaattcaatgccgcaacatatagttgaggccgaggataaagaaaagacattttaagtttgtagtaaaagtggtctctgctggggaagggttttcttttctttttttctttaataacaaggagatttcttagttcatatatcaagaagtcttgaagttgggtgtttccagaattggtaaaaacagcagctcatagaattttgagtattccatgagctgctcattacagttctttcctctttctgctctgccatcttcaggatattggttcttcccctcatagtaataagatggctgtggcatttccaaacatccaaaaaaagggaaggatttaaggaggtgaagtcgggtcaaaaataaaatatatatacatatatacattgcttagaacgttaaactattagagtatttcccttccaaagagggatgtttggaaaaaactctgaaggagaggaggaattagttgggatgccaatttcctctccactgctggacatgagatggagaggctgagggacaggatctataggcagcttctaagagcgaacttcacataggaagggatctgagaacacgttgccaggggcttgagaaggttactgagtgagttattgggagtcttaataaaataaactagatattaggtccattcattaattagttccagtttctccttgaaatgagtaaaaactagaaggcttctctccacagtgttgtgccccttcactcatttttttttgaggagaagggggtctctgttaacatctagcctaaagtatacaactgcctggggggcagggttaggaatctcttcactaccctgattcttgattcctggctctaccctgtctgtcccttttctttgaccagatctttctcttccctgaacgttttcttctttccctggacaggcagcctcctttgtgtgtattcagaggcagtgatgacttgctgtccaggcagctccctcctgcacacagaatgctcagggtcactgaaccactgcttctcttttgaaagtagagctagctgccactttcacgtggcctccgcagtgtctccacctacacccctgtgctcccctgccacactgatggctcaagacaaggctggcaaaccctcccagaaacatctctggcccagaaagcctctctctccctccctctctcatgaggcacagccaagccaagcgctcatgttgagccagtgggccagccacagagcaaaagagggtttattttcagtcccctctctctgggtcagaaccagagggcatgctgaatgccccctgcttacttggtgagggtgccccgcctgagtcagtgctctcagctggcagtgcaatgcttgtagaagtaggaggaaacagttctcactgggaagaagcaagggcaagaacccaagtgcctcacctcgaaaggaggccctgttccctggagtcagggtgaactgcaaagctttggctgagacctgggatttgagataccacaaaccctgctgaacacagtgtctgttcagcaaactaaccagcattccctacagcctagggcagacaatagtatagaagtctggaaaaaaacaaaaacagaatttgagaaccttggaccactcctgtccctgtagctcagtcatcaaagcagaagtctggctttgctctattaagattggaaatgtacactaccaaacactcagtccactgttgagccccagtgctggaagggaggaaggcctttcttctgtgttaattgcgtagaggctacaggggttagcctggactaaaggcatccttgtcttttgagctattcacctcagtagaaaaggatctaagggaagatcactgtagtttagttctgttgacctgtgcacctaccccttggaaatgtctgctggtatttctaattccacaggtcatcagatgcctgcttgataatatataaacaataaaaacaactttcacttcttcctattgtaatcgtgtgccatggatctgatctgtaccatgaccctacataaggctggatggcacctcaggctgagggccccaatgtatgtgtggctgtgggtgtgggtgggagtgtgtctgctgagtaaggaacacgattttcaagattctaaagctcaattcaagtgacacattaatgataaactcagatctgatcaagagtccggatttctaacagtccttgctttggggggtgtgctgacaacttagctcaggtgccttacatcttttctaatcacagtgttgcatatgagcctgccctcactccctctgcagaatccctttgcacctgagaccctactgaagtggctggtagaaaaaggggcctgagtggaggattatcagtatcacgatttgcaggattcccttctgggcttcattctggaaacttttgttagggctgcttttcttaagtgcccacatttgatggagggtggaaataatttgaatgtatttgatttataagttttttttttttttttgggttaaaagatggttgtagcatttaaaatggaaaattttctccttggtttgctagtatcttgggtgtattctctgtaagtgtagctcaaataggtcatcatgaaaggttaaaaaagcgaggtggccatgttatgctggtggttaaggccagggcctctccaaccactgtgccactgacttgctgtgtgaccctgggcaagtcacttaactataaggtgcctcagttttccttctgttaaaatggggataataatactgacctacctcaaagggcagttttgaggcatgactaatgctttttagaaagcattttgggatccttcagcacaggaattctcaagacctgagtattttttataataggaatgtccaccatgaacttgatacgtccgtgtgtcccagatgctgtcattagtctatatggttctccaagaaactgaatgaatccattggagaagcggtggataactagccagacaaaatttgagaatacataaacaacgcattgccacggaaacatacagaggatgccttttctgtgattgggtgggattttttccctttttatgtgggatatagtagttacttgtgacaagaataattttggaataatttctattaatatcaactctgaagctaattgtactaatctgagattgtgtttgttcataataaaagtgaagtgaatctgattgcaaaaaa

SEQ ID NO: 31 - protein, 359 aa, Homo sapiens
MPAHLLQDDISSSYTTTTTITAPPSRVLQNGGDKLETMPLYLEDDIRPDIKDDIYDPTYKDKEGPSPKVEYVWRNIILMSLLHLGALYGITLIPTCKFYTWLWGVFYYFVSALGITAGAHRLWSHRSYKARLPLRLFLIIANTMAFQNDVYEWARDHRAHHKFSETHADPHNSRRGFFFSHVGWLLVRKHPAVKEKGSTLDLSDLEAEKLVMFQRRYYKPGLLMMCFILPTLVPWYFWGETFQNSVFVATFLRYAVVLNATWLVNSAAHLFGYRPYDKNISPRENILVSLGAVGEGFHNYHHSFPYDYSASEYRWHINFTTFFIDCMAALGLAYDRKKVSKAAILARIKRTGDGNYKSG

SEQ ID NO: 32 - DNA, 4450 bp, Homo sapiens
agccgatgggggcggggaaaagtccggctgggccgggacaaaagccggatcccgggaagctaccggctgctggggtgctccggattttgcggggttcgtcgggcctgtggaagaagcgccgcgcacggacttcggcagaggtagagcaggtctctctgcagccatgtcggccaaggcaatttcagagcagacgggcaaagaactcctttacaagttcatctgtaccacctcagccatccagaatcggttcaagtatgctcgggtcactcctgacacagactgggcccgcttgctgcaggaccacccctggctgctcagccagaacttggtagtcaagccagaccagctgatcaaacgtcgtggaaaacttggtctcgttggggtcaacctcactctggatggggtcaagtcctggctgaagccacggctgggacaggaagccacagttggcaaggccacaggcttcctcaagaactttctgatcgagcccttcgtcccccacagtcaggctgaggagttctatgtctgcatctatgccacccgagaaggggactacgtcctgttccaccacgaggggggtgtggacgtgggtgatgtggacgccaaggcccagaagctgcttgttggcgtggatgagaaactgaatcctgaggacatcaaaaaacacctgttggtccacgcccctgaagacaagaaagaaattctggccagttttatctccggcctcttcaatttctacgaggacttgtacttcacctacctcgagatcaatccccttgtagtgaccaaagatggagtctatgtccttgacttggcggccaaggtggacgccactgccgactacatctgcaaagtgaagtggggtgacatcgagttccctccccccttcgggcgggaggcatatccagaggaagcctacattgcagacctcgatgccaaaagtggggcaagcctgaagctgaccttgctgaaccccaaagggaggatctggaccatggtggccgggggtggcgcctctgtcgtgtacagcgataccatctgtgatctagggggtgtcaacgagctggcaaactatggggagtactcaggcgcccccagcgagcagcagacctatgactatgccaagactatcctctccctcatgacccgagagaagcacccagatggcaagatcctcatcattggaggcagcatcgcaaacttcaccaacgtggctgccacgttcaagggcatcgtgagagcaattcgagattaccagggccccctgaaggagcacgaagtcacaatctttgtccgaagaggtggccccaactatcaggagggcttacgggtgatgggagaagtcgggaagaccactgggatccccatccatgtctttggcacagagactcacatgacggccattgtgggcatggccctgggccaccggcccatccccaaccagccacccacagcggcccacactgcaaacttcctcctcaacgccagcgggagcacatcgacgccagcccccagcaggacagcatctttttctgagtccagggccgatgaggtggcgcctgcaaagaaggccaagcctgccatgccacaagattcagtcccaagtccaagatccctgcaaggaaagagcaccaccctcttcagccgccacaccaaggccattgtgtggggcatgcagacccgggccgtgcaaggcatgctggactttgactatgtctgctcccgagacgagccctcagtggctgccatggtctaccctttcactggggaccacaagcagaagttttactgggggcacaaagagatcctgatccctgtcttcaagaacatggctgatgccatgaggaagcatccggaggtagatgtgctcatcaactttgcctctctccgctctgcctatgacagcaccatggagaccatgaactatgcccagatccggaccatcgccatcatagctgaaggcatccctgaggccctcacgagaaagctgatcaagaaggcggaccagaagggagtgaccatcatcggacctgccactgttggaggcatcaagcctgggtgctttaagattggcaacacaggtgggatgctggacaacatcctggcctccaaactgtaccgcccaggcagcgtggcctatgtctcacgttccggaggcatgtccaacgagctcaacaatatcatctctcggaccacggatggcgtctatgagggcgtggccattggtggggacaggtacccgggctccacattcatggatcatgtgttacgctatcaggacactccaggagtcaaaatgattgtggttcttggagagattgggggcactgaggaatataagatttgccggggcatcaaggagggccgcctcactaagcccatcgtctgctggtgcatcgggacgtgtgccaccatgttctcctctgaggtccagtttggccatgctggagcttgtgccaaccaggcttctgaaactgcagtagccaagaaccaggctttgaaggaagcaggagtgtttgtgccccggagctttgatgagcttggagagatcatccagtctgtatacgaagatctcgtggccaatggagtcattgtacctgcccaggaggtgccgcccccaaccgtgcccatggactactcctgggccagggagcttggtttgatccgcaaacctgcctcgttcatgaccagcatctgcgatgagcgaggacaggagctcatctacgcgggcatgcccatcactgaggtcttcaaggaagagatgggcattggcggggtcctcggcctcctctggttccagaaaaggttgcctaagtactcttgccagttcattgagatgtgtctgatggtgacagctgatcacgggccagccgtctctggagcccacaacaccatcatttgtgcgcgagctgggaaagacctggtctccagcctcacctcggggctgctcaccatcggggatcggtttgggggtgccttggatgcagcagccaagatgttcagtaaagcctttgacagtggcattatccccatggagtttgtgaacaagatgaagaaggaagggaagctgatcatgggcattggtcaccgagtgaagtcgataaacaacccagacatgcgagtgcagatcctcaaagattacgtcaggcagcacttccctgccactcctctgctcgattatgcactggaagtagagaagattaccacctcgaagaagccaaatcttatcctgaatgtagatggtctcatcggagtcgcatttgtagacatgcttagaaactgtgggtcctttactcgggaggaagctgatgaatatattgacattggagccctcaatggcatctttgtgctgggaaggagtatggggttcattggacactatcttgatcagaagaggctgaagcaggggctgtatcgtcatccgtgggatgatatttcatatgttcttccggaacacatgagcatgtaacagagccaggaaccctactgcagtaaactgaagacaagatctcttcccccaagaaaaagtgtacagacagctggcagtggagcctgctttatttagcaggggcctggaatgtaaacagccactggggtacaggcaccgaagaccaacatccacaggctaacaccccttcagtccacacaaagaagcttcatattttttttataagcatagaaataaaaaccaagccaatatttgtgactttgctctgctacctgctgtatttattatatggaagcatctaagtactgtcaggatggggtcttcctcattgtagggcgttaggatgttgctttctttttccattagttaaacatttttttctcctttggaggaagggaatgaaacatttatggcctcaagatactatacatttaaagcaccccaatgtctctctttttttttttttacttccctttcttcttccttatataacatgaagaacattgtattaatctgatttttaaagatctttttgtatgttacgtgttaagggcttgtttggtatcccactgaaatgttctgtgttgcagaccagagtctgtttatgtcagggggatggggccattgcatccttagccattgtcacaaaatatgtggagtagtaacttaatatgtaaagttgtaacatacatacatttaaaatggaaatgcagaaagctgtgaaatgtcttgtgtcttatgttctctgtatttatgcagctgatttgtctgtctgtaactgaagtgtgggtccaaggactcctaactactttgcatctgtaatccacaaagattctgggcagctgccacctcagtctcttctctgtattatcatagtctggtttaaataaactatatagtaacaaaaaaaaaaaaaaaaaaaaaaaaaaaaaaaaaaaaaaaaaaaaaaaaaaaaaaaaaaaaaaaaaaaaaaaaaaaaaaaaaaaaaaaaaaaaaaaaaaa

SEQ ID NO: 33 - DNA, 4420 bp, Homo sapiens
agccgatgggggcggggaaaagtccggctgggccgggacaaaagccggatcccgggaagctaccggctgctggggtgctccggattttgcggggttcgtcgggcctgtggaagaagcgccgcgcacggacttcggcagaggtagagcaggtctctctgcagccatgtcggccaaggcaatttcagagcagacgggcaaagaactcctttacaagttcatctgtaccacctcagccatccagaatcggttcaagtatgctcgggtcactcctgacacagactgggcccgcttgctgcaggaccacccctggctgctcagccagaacttggtagtcaagccagaccagctgatcaaacgtcgtggaaaacttggtctcgttggggtcaacctcactctggatggggtcaagtcctggctgaagccacggctgggacaggaagccacagttggcaaggccacaggcttcctcaagaactttctgatcgagcccttcgtcccccacagtcaggctgaggagttctatgtctgcatctatgccacccgagaaggggactacgtcctgttccaccacgaggggggtgtggacgtgggtgatgtggacgccaaggcccagaagctgcttgttggcgtggatgagaaactgaatcctgaggacatcaaaaaacacctgttggtccacgcccctgaagacaagaaagaaattctggccagttttatctccggcctcttcaatttctacgaggacttgtacttcacctacctcgagatcaatccccttgtagtgaccaaagatggagtctatgtccttgacttggcggccaaggtggacgccactgccgactacatctgcaaagtgaagtggggtgacatcgagttccctccccccttcgggcgggaggcatatccagaggaagcctacattgcagacctcgatgccaaaagtggggcaagcctgaagctgaccttgctgaaccccaaagggaggatctggaccatggtggccgggggtggcgcctctgtcgtgtacagcgataccatctgtgatctagggggtgtcaacgagctggcaaactatggggagtactcaggcgcccccagcgagcagcagacctatgactatgccaagactatcctctccctcatgacccgagagaagcacccagatggcaagatcctcatcattggaggcagcatcgcaaacttcaccaacgtggctgccacgttcaagggcatcgtgagagcaattcgagattaccagggccccctgaaggagcacgaagtcacaatctttgtccgaagaggtggccccaactatcaggagggcttacgggtgatgggagaagtcgggaagaccactgggatccccatccatgtctttggcacagagactcacatgacggccattgtgggcatggccctgggccaccggcccatccccaaccagccacccacagcggcccacactgcaaacttcctcctcaacgccagcgggagcacatcgacgccagcccccagcaggacagcatctttttctgagtccagggccgatgaggtggcgcctgcaaagaaggccaagcctgccatgccacaaggaaagagcaccaccctcttcagccgccacaccaaggccattgtgtggggcatgcagacccgggccgtgcaaggcatgctggactttgactatgtctgctcccgagacgagccctcagtggctgccatggtctaccctttcactggggaccacaagcagaagttttactgggggcacaaagagatcctgatccctgtcttcaagaacatggctgatgccatgaggaagcatccggaggtagatgtgctcatcaactttgcctctctccgctctgcctatgacagcaccatggagaccatgaactatgcccagatccggaccatcgccatcatagctgaaggcatccctgaggccctcacgagaaagctgatcaagaaggcggaccagaagggagtgaccatcatcggacctgccactgttggaggcatcaagcctgggtgctttaagattggcaacacaggtgggatgctggacaacatcctggcctccaaactgtaccgcccaggcagcgtggcctatgtctcacgttccggaggcatgtccaacgagctcaacaatatcatctctcggaccacggatggcgtctatgagggcgtggccattggtggggacaggtacccgggctccacattcatggatcatgtgttacgctatcaggacactccaggagtcaaaatgattgtggttcttggagagattgggggcactgaggaatataagatttgccggggcatcaaggagggccgcctcactaagcccatcgtctgctggtgcatcgggacgtgtgccaccatgttctcctctgaggtccagtttggccatgctggagcttgtgccaaccaggcttctgaaactgcagtagccaagaaccaggctttgaaggaagcaggagtgtttgtgccccggagctttgatgagcttggagagatcatccagtctgtatacgaagatctcgtggccaatggagtcattgtacctgcccaggaggtgccgcccccaaccgtgcccatggactactcctgggccagggagcttggtttgatccgcaaacctgcctcgttcatgaccagcatctgcgatgagcgaggacaggagctcatctacgcgggcatgcccatcactgaggtcttcaaggaagagatgggcattggcggggtcctcggcctcctctggttccagaaaaggttgcctaagtactcttgccagttcattgagatgtgtctgatggtgacagctgatcacgggccagccgtctctggagcccacaacaccatcatttgtgcgcgagctgggaaagacctggtctccagcctcacctcggggctgctcaccatcggggatcggtttgggggtgccttggatgcagcagccaagatgttcagtaaagcctttgacagtggcattatccccatggagtttgtgaacaagatgaagaaggaagggaagctgatcatgggcattggtcaccgagtgaagtcgataaacaacccagacatgcgagtgcagatcctcaaagattacgtcaggcagcacttccctgccactcctctgctcgattatgcactggaagtagagaagattaccacctcgaagaagccaaatcttatcctgaatgtagatggtctcatcggagtcgcatttgtagacatgcttagaaactgtgggtcctttactcgggaggaagctgatgaatatattgacattggagccctcaatggcatctttgtgctgggaaggagtatggggttcattggacactatcttgatcagaagaggctgaagcaggggctgtatcgtcatccgtgggatgatatttcatatgttcttccggaacacatgagcatgtaacagagccaggaaccctactgcagtaaactgaagacaagatctcttcccccaagaaaaagtgtacagacagctggcagtggagcctgctttatttagcaggggcctggaatgtaaacagccactggggtacaggcaccgaagaccaacatccacaggctaacaccccttcagtccacacaaagaagcttcatattttttttataagcatagaaataaaaaccaagccaatatttgtgactttgctctgctacctgctgtatttattatatggaagcatctaagtactgtcaggatggggtcttcctcattgtagggcgttaggatgttgctttctttttccattagttaaacatttttttctcctttggaggaagggaatgaaacatttatggcctcaagatactatacatttaaagcaccccaatgtctctctttttttttttttacttccctttcttcttccttatataacatgaagaacattgtattaatctgatttttaaagatctttttgtatgttacgtgttaagggcttgtttggtatcccactgaaatgttctgtgttgcagaccagagtctgtttatgtcagggggatggggccattgcatccttagccattgtcacaaaatatgtggagtagtaacttaatatgtaaagttgtaacatacatacatttaaaatggaaatgcagaaagctgtgaaatgtcttgtgtcttatgttctctgtatttatgcagctgatttgtctgtctgtaactgaagtgtgggtccaaggactcctaactactttgcatctgtaatccacaaagattctgggcagctgccacctcagtctcttctctgtattatcatagtctggtttaaataaactatatagtaacaaaaaaaaaaaaaaaaaaaaaaaaaaaaaaaaaaaaaaaaaaaaaaaaaaaaaaaaaaaaaaaaaaaaaaaaaaaaaaaaaaaaaaaaaaaaaaaaaaa

SEQ ID NO: 34 - protein, 1101 aa, Homo sapiens
MSAKAISEQTGKELLYKFICTTSAIQNRFKYARVTPDTDWARLLQDHPWLLSQNLVVKPDQLIKRRGKLGLVGVNLTLDGVKSWLKPRLGQEATVGKATGFLKNFLIEPFVPHSQAEEFYVCIYATREGDYVLFHHEGGVDVGDVDAKAQKLLVGVDEKLNPEDIKKHLLVHAPEDKKEILASFISGLFNFYEDLYFTYLEINPLVVTKDGVYVLDLAAKVDATADYICKVKWGDIEFPPPFGREAYPEEAYIADLDAKSGASLKLTLLNPKGRIWTMVAGGGASVVYSDTICDLGGVNELANYGEYSGAPSEQQTYDYAKTILSLMTREKHPDGKILIIGGSIANFTNVAATFKGIVRAIRDYQGPLKEHEVTIFVRRGGPNYQEGLRVMGEVGKTTGIPIHVFGTETHMTAIVGMALGHRPIPNQPPTAAHTANFLLNASGSTSTPAPSRTASFSESRADEVAPAKKAKPAMPQDSVPSPRSLQGKSTTLFSRHTKAIVWGMQTRAVQGMLDFDYVCSRDEPSVAAMVYPFTGDHKQKFYWGHKEILIPVFKNMADAMRKHPEVDVLINFASLRSAYDSTMETMNYAQIRTIAIIAEGIPEALTRKLIKKADQKGVTIIGPATVGGIKPGCFKIGNTGGMLDNILASKLYRPGSVAYVSRSGGMSNELNNIISRTTDGVYEGVAIGGDRYPGSTFMDHVLRYQDTPGVKMIVVLGEIGGTEEYKICRGIKEGRLTKPIVCWCIGTCATMFSSEVQFGHAGACANQASETAVAKNQALKEAGVFVPRSFDELGEIIQSVYEDLVANGVIVPAQEVPPPTVPMDYSWARELGLIRKPASFMTSICDERGQELIYAGMPITEVFKEEMGIGGVLGLLWFQKRLPKYSCQFIEMCLMVTADHGPAVSGAHNTIICARAGKDLVSSLTSGLLTIGDRFGGALDAAAKMFSKAFDSGIIPMEFVNKMKKEGKLIMGIGHRVKSINNPDMRVQILKDYVRQHFPATPLLDYALEVEKITTSKKPNLILNVDGLIGVAFVDMLRNCGSFTREEADEYIDIGALNGIFVLGRSMGFIGHYLDQKRLKQGLYRHPWDDISYVLPEHMSM

SEQ ID NO: 35 - protein, 1091 aa, Homo sapiens
MSAKAISEQTGKELLYKFICTTSAIQNRFKYARVTPDTDWARLLQDHPWLLSQNLVVKPDQLIKRRGKLGLVGVNLTLDGVKSWLKPRLGQEATVGKATGFLKNFLIEPFVPHSQAEEFYVCIYATREGDYVLFHHEGGVDVGDVDAKAQKLLVGVDEKLNPEDIKKHLLVHAPEDKKEILASFISGLFNFYEDLYFTYLEINPLVVTKDGVYVLDLAAKVDATADYICKVKWGDIEFPPPFGREAYPEEAYIADLDAKSGASLKLTLLNPKGRIWTMVAGGGASVVYSDTICDLGGVNELANYGEYSGAPSEQQTYDYAKTILSLMTREKHPDGKILIIGGSIANFTNVAATFKGIVRAIRDYQGPLKEHEVTIFVRRGGPNYQEGLRVMGEVGKTTGIPIHVFGTETHMTAIVGMALGHRPIPNQPPTAAHTANFLLNASGSTSTPAPSRTASFSESRADEVAPAKKAKPAMPQGKSTTLFSRHTKAIVWGMQTRAVQGMLDFDYVCSRDEPSVAAMVYPFTGDHKQKFYWGHKEILIPVFKNMADAMRKHPEVDVLINFASLRSAYDSTMETMNYAQIRTIAIIAEGIPEALTRKLIKKADQKGVTIIGPATVGGIKPGCFKIGNTGGMLDNILASKLYRPGSVAYVSRSGGMSNELNNIISRTTDGVYEGVAIGGDRYPGSTFMDHVLRYQDTPGVKMIVVLGEIGGTEEYKICRGIKEGRLTKPIVCWCIGTCATMFSSEVQFGHAGACANQASETAVAKNQALKEAGVFVPRSFDELGEIIQSVYEDLVANGVIVPAQEVPPPTVPMDYSWARELGLIRKPASFMTSICDERGQELIYAGMPITEVFKEEMGIGGVLGLLWFQKRLPKYSCQFIEMCLMVTADHGPAVSGAHNTIICARAGKDLVSSLTSGLLTIGDRFGGALDAAAKMFSKAFDSGIIPMEFVNKMKKEGKLIMGIGHRVKSINNPDMRVQILKDYVRQHFPATPLLDYALEVEKITTSKKPNLILNVDGLIGVAFVDMLRNCGSFTREEADEYIDIGALNGIFVLGRSMGFIGHYLDQKRLKQGLYRHPWDDISYVLPEHMSM

SEQ ID NO: 36 - DNA, 3164 bp, Homo sapiens
aaagtggctgaatgagaaatgtagattgcagagggcaactggtgtgtttatatgcctgacattatttgggttttcccccctcaggcagaagctgaggaagattgtcattctgatactgtcagagcagatgatgatgaagaaaatgaaagtcctgctgaaacagatctgcaggcacaactccagatgttccgagctcagtggatgtttgaacttgctccaggtgtaagctctagcaatttagaaaatcgaccttgcagagcagcaagaggctctctccagaaaacatcggcagataccaaaggaaaacaagaacaggcaaaagaagaaaaggctcgagaactcttcctaaaagcagtagaagaagaacaaaatggagctctctatgaagccatcaagttttatcgtagggctatgcaacttgtacctgatatagagttcaagattacttatacccggtctccagatggtgatggcgttggaaacagctacattgaagataatgatgatgacagcaaaatggcagatctcttgtcctacttccagcagcaactcacatttcaggagtctgtgcttaaactgtgtcagcctgagcttgagagcagtcagattcacatatcagtgctgccaatggaggtcctgatgtacatcttccgatgggtggtgtctagtgacttggacctcagatcattggagcagttgtcgctggtgtgcagaggattctacatctgtgccagagaccctgaaatatggcgtctggcctgcttgaaagtttggggcagaagctgtattaaacttgttccgtacacgtcctggagagagatgtttttagaacggcctcgtgttcggtttgatggcgtgtatatcagtaaaaccacatatattcgtcaaggggaacagtctcttgatggtttctatagagcctggcaccaagtggaatattacaggtacataagattctttcctgatggccatgtgatgatgttgacaacccctgaagagcctcagtccattgttccacgtttaagaactaggaataccaggactgatgcaattctactgggtcactatcgcttgtcacaagacacagacaatcagaccaaagtatttgctgtaataactaagaaaaaagaagaaaaaccacttgactataaatacagatattttcgtcgtgtccctgtacaagaagcagatcagagttttcatgtggggctacagctatgttccagtggtcaccagaggttcaacaaactcatctggatacatcattcttgtcacattacttacaaatcaactggtgagactgcagtcagtgcttttgagattgacaagatgtacacccccttgttcttcgccagagtaaggagctacacagctttctcagaaaggcctctgtagagcctcaagtccagtcctctatcacttttgcatgaattaaagtatatagcgcaaaagagcacctaagttataaatgtgtgtgtgtgtgtgtgtgtgtatatatatatatatatatatatatatatatatatatatatatatatatggaattggaacttattttaaattgttggagttcttttaagaagaatataaattgattattttttttatttaaagggatagttgattcctggggtgttttgaaattaagttggaattaagttgcttaagcatatttatgttgtgagaaaccttaatatgaggtttatcatgccctttttcaagcagatttatgagcagatttctgtcacataagtcgtcttctgcttgagtatcctaatatttcaatgcatcaggggagcgctccactggataagcattttatttcccgcatggcataatgtttttgcactaaaggctcaaagtgtgagaacctgttctggatttgtttgaaattatttcaccaataaagatcataaataaatgtttctttcaagaaaatatatttggatggcctttttaaagtaacaggatatttaataagagtcctagatagccagcggagactttaagaatcattgcctctagctgggtgtggtggcatgcacctgtagtcccagctatttgggaggctgatgcaggagaatagcttaagcccaggaatttgagtctgggagtttgagtccagcatgggcaacataacaagaccccatcccttattaaaagaaaaaaaaataattcctcatttcatcattggtctttatatgtagccacaaacactgacctcatgtaggcaccttaccaatatatgacattaagtgagagtgaatcccttaggactggaacacttcaagctcaaccaactgactcagttgtcattcttcacaaaagaatagtagaggatcatgtaaacctgagcctaactcttgttccagtatgaaagttgggggagagcaccagccacctaggaaaactgtatgttacctttttactcaaaggagtcccccctgcccagtaacagtcctattagtgtttaatttcagagtttgtgtctggtagacctctacctgattcagatttggttttgttgtttcaaccatagttagagacaaattctcatgtactttcagaaatcaatatctgcagccactgttacttttaattgacattaagagacacttcataggttcccacaattcagtatgggataggctttttaaaaagcacatacagaccaggcgtggtggctcatgcctataatcccagcactttgggaggctaagacaggcagatcacctgagctcaggagtccaagaccagcctgggcaacatggcaaaacaccgtctctacaaaaaaaaaaaaaaaaaaaattagccaagtacagtggggcacacctatagtcgcagctacttgggaggctggggcaggagaattgcctgagcctgggaagtggaagttgcagtgagccaagatcgtgccattccactccagcctgagcaacacagtgagaccctatctcaaaaaaataatgatgatagtacacgttatgttaaaggtgaaatgtgcatacagaaggaagagagttggccaggtgtggtgactcacacctataatcccaatactttgggaggccaaggcaggaggattgcttgaggtcaggagttttagaccagcctggacaacatagcaagacctcatctcttctaaaaattaaaaaaaaaaaaaa

SEQ ID NO: 37 - DNA, 3454 bp, Homo sapiens
aggtttccgcagctgagggggcagctccgcggcggcgtccggggtctccagtagggctgacgctccggtgctcgcacaatcccccgcctcggctggcaacgggcgtccctccactccccgagtccccggcagccgccgccaccccagcgcgccccgatctggccccctgccccgcgaagatggctgccgtacgccgggcccgcagttattgccgctgcctggtgcgcttctccgaccgagaactctgctaagctccgctgcagagacaggcaggagtagacacccggacacccagcacccctcctccggggggcggtgcagagggggcacggagagcccctcgagcgcagcaggccgccccgccagcatggcagaagctgaggaagattgtcattctgatactgtcagagcagatgatgatgaagaaaatgaaagtcctgctgaaacagatctgcaggcacaactccagatgttccgagctcagtggatgtttgaacttgctccaggtgtaagctctagcaatttagaaaatcgaccttgcagagcagcaagaggctctctccagaaaacatcggcagataccaaaggaaaacaagaacaggcaaaagaagaaaaggctcgagaactcttcctaaaagcagtagaagaagaacaaaatggagctctctatgaagccatcaagttttatcgtagggctatgcaacttgtacctgatatagagttcaagattacttatacccggtctccagatggtgatggcgttggaaacagctacattgaagataatgatgatgacagcaaaatggcagatctcttgtcctacttccagcagcaactcacatttcaggagtctgtgcttaaactgtgtcagcctgagcttgagagcagtcagattcacatatcagtgctgccaatggaggtcctgatgtacatcttccgatgggtggtgtctagtgacttggacctcagatcattggagcagttgtcgctggtgtgcagaggattctacatctgtgccagagaccctgaaatatggcgtctggcctgcttgaaagtttggggcagaagctgtattaaacttgttccgtacacgtcctggagagagatgtttttagaacggcctcgtgttcggtttgatggcgtgtatatcagtaaaaccacatatattcgtcaaggggaacagtctcttgatggtttctatagagcctggcaccaagtggaatattacaggtacataagattctttcctgatggccatgtgatgatgttgacaacccctgaagagcctcagtccattgttccacgtttaagaactaggaataccaggactgatgcaattctactgggtcactatcgcttgtcacaagacacagacaatcagaccaaagtatttgctgtaataactaagaaaaaagaagaaaaaccacttgactataaatacagatattttcgtcgtgtccctgtacaagaagcagatcagagttttcatgtggggctacagctatgttccagtggtcaccagaggttcaacaaactcatctggatacatcattcttgtcacattacttacaaatcaactggtgagactgcagtcagtgcttttgagattgacaagatgtacacccccttgttcttcgccagagtaaggagctacacagctttctcagaaaggcctctgtagagcctcaagtccagtcctctatcacttttgcatgaattaaagtatatagcgcaaaagagcacctaagttataaatgtgtgtgtgtgcgtgtgtgtgtatatatatatatatatatatatatatatatatatatatatatatatatggaattggaacttattttaaattgttggagttcttttaagaagaatataaattgattattttttttatttaaagggatagttgattcctggggtgttttgaaattaagttggaattaagttgcttaagcatatttatgttgtgagaaaccttaatatgaggtttatcatgccctttttcaagcagatttatgagcagatttctgtcacataagtcgtcttctgcttgagtatcctaatatttcaatgcatcaggggagcgctccactggataagcattttatttcccgcatggcataatgtttttgcactaaaggctcaaagtgtgagaacctgttctggatttgtttgaaattatttcaccaataaagatcataaataaatgtttctttcaagaaaatatatttggatggcctttttaaagtaacaggatatttaataagagtcctagatagccagcggagactttaagaatcattgcctctagctgggtgtggtggcatgcacctgtagtcccagctatttgggaggctgatgcaggagaatagcttaagcccaggaatttgagtctgggagtttgagtccagcatgggcaacataacaagaccccatcccttattaaaagaaaaaaaaataattcctcatttcatcattggtctttatatgtagccacaaacactgacctcatgtaggcaccttaccaatatatgacattaagtgagagtgaatcccttaggactggaacacttcaagctcaaccaactgactcagttgtcattcttcacaaaagaatagtagaggatcatgtaaacctgagcctaactcttgttccagtatgaaagttgggggagagcaccagccacctaggaaaactgtatgttacctttttactcaaaggagtcccccctgcccagtaacagtcctattagtgtttaatttcagagtttgtgtctggtagacctctacctgattcagatttggttttgttgtttcaaccatagttagagacaaattctcatgtactttcagaaatcaatatctgcagccactgttacttttaattgacattaagagacacttcataggttcccacaattcagtatgggataggctttttaaaaagcacatacagaccaggcgtggtggctcatgcctataatcccagcactttgggaggctaagacaggcagatcacctgagctcaggagtccaagaccagcctgggcaacatggcaaaacaccgtctctacaaaaaaaaaaaaaaaaaaaattagccaagtacagtggggcacacctatagtcgcagctacttgggaggctggggcaggagaattgcctgagcctgggaagtggaagttgcagtgagccaagatcgtgccattccactccagcctgagcaacacagtgagaccctatctcaaaaaaataatgatgatagtacacgttatgttaaaggtgaaatgtgcatacagaaggaagagagttggccaggtgtggtgactcacacctataatcccaatactttgggaggccaaggcaggaggattgcttgaggtcaggagttttagaccagcctggacaacatagcaagacctcatctcttctaaaaattaaaaaaaaaaaaaatagg

SEQ ID NO: 38 - DNA, 3291 bp, Homo sapiens
ctccagtctgtctgtgctctcaaaaactttagtcgttataacaactgtgactgttgagaaatttcactgttttcctgcattcctggcgcgggactctagccagaggctccgaggactttgtagcgactgtcccaagcgtccagttcgatgcttctcagggcggcttgctttaagggcccacccctaaatttgggttgtaaaaatttttgaggcagaagctgaggaagattgtcattctgatactgtcagagcagatgatgatgaagaaaatgaaagtcctgctgaaacagatctgcaggcacaactccagatgttccgagctcagtggatgtttgaacttgctccaggtgtaagctctagcaatttagaaaatcgaccttgcagagcagcaagaggctctctccagaaaacatcggcagataccaaaggaaaacaagaacaggcaaaagaagaaaaggctcgagaactcttcctaaaagcagtagaagaagaacaaaatggagctctctatgaagccatcaagttttatcgtagggctatgcaacttgtacctgatatagagttcaagattacttatacccggtctccagatggtgatggcgttggaaacagctacattgaagataatgatgatgacagcaaaatggcagatctcttgtcctacttccagcagcaactcacatttcaggagtctgtgcttaaactgtgtcagcctgagcttgagagcagtcagattcacatatcagtgctgccaatggaggtcctgatgtacatcttccgatgggtggtgtctagtgacttggacctcagatcattggagcagttgtcgctggtgtgcagaggattctacatctgtgccagagaccctgaaatatggcgtctggcctgcttgaaagtttggggcagaagctgtattaaacttgttccgtacacgtcctggagagagatgtttttagaacggcctcgtgttcggtttgatggcgtgtatatcagtaaaaccacatatattcgtcaaggggaacagtctcttgatggtttctatagagcctggcaccaagtggaatattacaggtacataagattctttcctgatggccatgtgatgatgttgacaacccctgaagagcctcagtccattgttccacgtttaagaactaggaataccaggactgatgcaattctactgggtcactatcgcttgtcacaagacacagacaatcagaccaaagtatttgctgtaataactaagaaaaaagaagaaaaaccacttgactataaatacagatattttcgtcgtgtccctgtacaagaagcagatcagagttttcatgtggggctacagctatgttccagtggtcaccagaggttcaacaaactcatctggatacatcattcttgtcacattacttacaaatcaactggtgagactgcagtcagtgcttttgagattgacaagatgtacacccccttgttcttcgccagagtaaggagctacacagctttctcagaaaggcctctgtagagcctcaagtccagtcctctatcacttttgcatgaattaaagtatatagcgcaaaagagcacctaagttataaatgtgtgtgtgtgtgtgtgtgtgtatatatatatatatatatatatatatatatatatatatatatatatatggaattggaacttattttaaattgttggagttcttttaagaagaatataaattgattattttttttatttaaagggatagttgattcctggggtgttttgaaattaagttggaattaagttgcttaagcatatttatgttgtgagaaaccttaatatgaggtttatcatgccctttttcaagcagatttatgagcagatttctgtcacataagtcgtcttctgcttgagtatcctaatatttcaatgcatcaggggagcgctccactggataagcattttatttcccgcatggcataatgtttttgcactaaaggctcaaagtgtgagaacctgttctggatttgtttgaaattatttcaccaataaagatcataaataaatgtttctttcaagaaaatatatttggatggcctttttaaagtaacaggatatttaataagagtcctagatagccagcggagactttaagaatcattgcctctagctgggtgtggtggcatgcacctgtagtcccagctatttgggaggctgatgcaggagaatagcttaagcccaggaatttgagtctgggagtttgagtccagcatgggcaacataacaagaccccatcccttattaaaagaaaaaaaaataattcctcatttcatcattggtctttatatgtagccacaaacactgacctcatgtaggcaccttaccaatatatgacattaagtgagagtgaatcccttaggactggaacacttcaagctcaaccaactgactcagttgtcattcttcacaaaagaatagtagaggatcatgtaaacctgagcctaactcttgttccagtatgaaagttgggggagagcaccagccacctaggaaaactgtatgttacctttttactcaaaggagtcccccctgcccagtaacagtcctattagtgtttaatttcagagtttgtgtctggtagacctctacctgattcagatttggttttgttgtttcaaccatagttagagacaaattctcatgtactttcagaaatcaatatctgcagccactgttacttttaattgacattaagagacacttcataggttcccacaattcagtatgggataggctttttaaaaagcacatacagaccaggcgtggtggctcatgcctataatcccagcactttgggaggctaagacaggcagatcacctgagctcaggagtccaagaccagcctgggcaacatggcaaaacaccgtctctacaaaaaaaaaaaaaaaaaaaattagccaagtacagtggggcacacctatagtcgcagctacttgggaggctggggcaggagaattgcctgagcctgggaagtggaagttgcagtgagccaagatcgtgccattccactccagcctgagcaacacagtgagaccctatctcaaaaaaataatgatgatagtacacgttatgttaaaggtgaaatgtgcatacagaaggaagagagttggccaggtgtggtgactcacacctataatcccaatactttgggaggccaaggcaggaggattgcttgaggtcaggagttttagaccagcctggacaacatagcaagacctcatctcttctaaaaattaaaaaaaaaaaaaa

SEQ ID NO: 39 - protein, 447 aa, Homo sapiens
MPDIIWVFPPQAEAEEDCHSDTVRADDDEENESPAETDLQAQLQMFRAQWMFELAPGVSSSNLENRPCRAARGSLQKTSADTKGKQEQAKEEKARELFLKAVEEEQNGALYEAIKFYRRAMQLVPDIEFKITYTRSPDGDGVGNSYIEDNDDDSKMADLLSYFQQQLTFQESVLKLCQPELESSQIHISVLPMEVLMYIFRWVVSSDLDLRSLEQLSLVCRGFYICARDPEIWRLACLKVWGRSCIKLVPYTSWREMFLERPRVRFDGVYISKTTYIRQGEQSLDGFYRAWHQVEYYRYIRFFPDGHVMMLTTPEEPQSIVPRLRTRNTRTDAILLGHYRLSQDTDNQTKVFAVITKKKEEKPLDYKYRYFRRVPVQEADQSFHVGLQLCSSGHQRFNKLIWIHHSCHITYKSTGETAVSAFEIDKMYTPLFFARVRSYTAFSERPL

SEQ ID NO: 40 - protein, 437 aa, Homo sapiens
MAEAEEDCHSDTVRADDDEENESPAETDLQAQLQMFRAQWMFELAPGVSSSNLENRPCRAARGSLQKTSADTKGKQEQAKEEKARELFLKAVEEEQNGALYEAIKFYRRAMQLVPDIEFKITYTRSPDGDGVGNSYIEDNDDDSKMADLLSYFQQQLTFQESVLKLCQPELESSQIHISVLPMEVLMYIFRWVVSSDLDLRSLEQLSLVCRGFYICARDPEIWRLACLKVWGRSCIKLVPYTSWREMFLERPRVRFDGVYISKTTYIRQGEQSLDGFYRAWHQVEYYRYIRFFPDGHVMMLTTPEEPQSIVPRLRTRNTRTDAILLGHYRLSQDTDNQTKVFAVITKKKEEKPLDYKYRYFRRVPVQEADQSFHVGLQLCSSGHQRFNKLIWIHHSCHITYKSTGETAVSAFEIDKMYTPLFFARVRSYTAFSERPL

SEQ ID NO: 41 - protein, 403 aa, Homo sapiens
MFRAQWMFELAPGVSSSNLENRPCRAARGSLQKTSADTKGKQEQAKEEKARELFLKAVEEEQNGALYEAIKFYRRAMQLVPDIEFKITYTRSPDGDGVGNSYIEDNDDDSKMADLLSYFQQQLTFQESVLKLCQPELESSQIHISVLPMEVLMYIFRWVVSSDLDLRSLEQLSLVCRGFYICARDPEIWRLACLKVWGRSCIKLVPYTSWREMFLERPRVRFDGVYISKTTYIRQGEQSLDGFYRAWHQVEYYRYIRFFPDGHVMMLTTPEEPQSIVPRLRTRNTRTDAILLGHYRLSQDTDNQTKVFAVITKKKEEKPLDYKYRYFRRVPVQEADQSFHVGLQLCSSGHQRFNKLIWIHHSCHITYKSTGETAVSAFEIDKMYTPLFFARVRSYTAFSERPL

SEQ ID NO: 42 - DNA, 2223 bp, Homo sapiens
tcagtgtgtgcggaacgcaagcagccgagagcggagaggcgccgctgtagttaactcctccctgcccgccgcgccgaccctccccaggaacccccagggagccagcatgaagcgagctcaccccgagtacagctcctcggacagcgagctggacgagaccatcgaggtggagaaggagagtgcggacgagaatggaaacttgagttcggctctaggttccatgtccccaactacatcttcccagattttggccagaaaaagacggagaggaataattgagaagcgccgacgagaccggatcaataacagtttgtctgagctgagaaggctggtacccagtgcttttgagaagcagggatctgctaagctagaaaaagccgagatcctgcagatgaccgtggatcacctgaaaatgctgcatacggcaggagggaaaggttactttgacgcgcacgcccttgctatggactatcggagtttgggatttcgggaatgcctggcagaagttgcgcgttatctgagcatcattgaaggactagatgcctctgacccgcttcgagttcgactggtttcgcatctcaacaactacgcttcccagcgggaagccgcgagcggcgcccacgcgggcctcggacacattccctgggggaccgtcttcggacatcacccgcacatcgcgcacccgctgttgctgccccagaacggccacgggaacgcgggcaccacggcctcacccacggaaccgcaccaccagggcaggctgggctcggcacatccggaggcgcctgctttgcgagcgccccctagcggcagcttcggaccggtgctccctgtggtcacctccgcctccaaactgtcgctgcctctgctctcctcagtggcctccctgtcggccttccccttctctttcggctccttccacttactgtctcccaatgcactgagcccttcagcacccacgcaggctgcaaaccttggcaagccctatagaccttgggggacggagatcggagctttttaaagaactgatgtagaatgagggaggggaaagtttaaaatcccagctgggctggactgttgccaacatcaccttaaagtcgtcagtaaaagtaaaaaggaaaaaggtacactttcagataattttttttttaaagactaaaggtttgttggtttacttttatcttttttaatgtttttttcatcatgtcatgtattagcagtttttaaaaactagttgttaaattttgttcaagacattaaattgaaatagtgagtataagccaacactttgtgataggtttgtactgtgcctaatttactttgtaaaccagaatgattccgtttttgcctcaaaatttggggaatcttaacatttaggtatttttggtctgtttttctccttgtatagttatggtctgtttttagaattaattttccaaaccactatgcttaatgttaacatgattctgtttgttaatattttgacagattaaggtgttgtataaataatattcttttggggggaggggaactatattgaattttatatttctgagcaaagcgttgacaaatcagatgatcagctttatccaagaaagaagactagtaaattgtctgcctcctatagcagaaaggtgaatgtacaaactgttggtggcctgaatccatctgaccagctgctggtatctgccaggactggcagttctgatttagttaggaggaccgctgataggttaggtctcatttggagtgttggtggaaaggaaactgaaggtaattgaatagaatacgcctgcatttaccagccccagcaacacaaagaatttttaatcacacggatctcaaattcacaaatgttaacatggataagtgatcatggtgtgcgagtggtcaattgagtagtacagtggaaactgttaaatgcataacctaattttcctgggactgccatattttcttttaactggaaatttttatgtgagttttccttttggtgcatggaactgtggttgccaaggtatttaaaagggctttcctgcctccttctctttgatttatttaatttgatttgggctataaaatatcatttttcaggtttattcttttagcaggtgtagttaaacgacctccactgaactgggtttgacctctgttgtactgatgtgttgtgactaaataaaaaagaaagaacaaagtaaaaaaaaaaaaaaaaaaaaaaaaaaa

SEQ ID NO: 43 - protein, 304 aa, Homo sapiens
MKRAHPEYSSSDSELDETIEVEKESADENGNLSSALGSMSPTTSSQILARKRRRGIIEKRRRDRINNSLSELRRLVPSAFEKQGSAKLEKAEILQMTVDHLKMLHTAGGKGYFDAHALAMDYRSLGFRECLAEVARYLSIIEGLDASDPLRVRLVSHLNNYASQREAASGAHAGLGHIPWGTVFGHHPHIAHPLLLPQNGHGNAGTTASPTEPHHQGRLGSAHPEAPALRAPPSGSFGPVLPVVTSASKLSLPLLSSVASLSAFPFSFGSFHLLSPNALSPSAPTQAANLGKPYRPWGTEIGAF

SEQ ID NO: 44 - DNA, 20 bp, Homo sapiens
cctgtcggatggcttttatg

SEQ ID NO: 45 - DNA, 20 bp, Homo sapiens
gcggtgcatgacattcatta

SEQ ID NO: 46 - DNA, 21 bp, Artificial Sequence
  oligonucleotide primer
ggaagcattgttgtcgtctcc

SEQ ID NO: 47 - DNA, 21 bp, Artificial Sequence
  oligonucleotide primer
cttgcttgcagaataggcagc

SEQ ID NO: 48 - DNA, 28 bp, Artificial Sequence
  oligonucleotide probe
ctctggctgggaaagtggcttatccaat

SEQ ID NO: 49 - DNA, 993 bp, Homo sapiens
attccacgttcttaactgttccattttccgtatctgcttcgggcttccacctcatttttttcgctttgcccattctgtttcagccagtcgccaagaatcatgaaagtcgccagtggcagcaccgccaccgccgccgcgggccccagctgcgcgctgaaggccggcaagacagcgagcggtgcgggcgaggtggtgcgctgtctgtctgagcagagcgtggccatctcgcgctgcgccgggggcgccggggcgcgcctgcctgccctgctggacgagcagcaggtaaacgtgctgctctacgacatgaacggctgttactcacgcctcaaggagctggtgcccaccctgccccagaaccgcaaggtgagcaaggtggagattctccagcacgtcatcgactacatcagggaccttcagttggagctgaactcggaatccgaagttggaacccccgggggccgagggctgccggtccgggctccgctcagcaccctcaacggcgagatcagcgccctgacggccgaggcggcatgcgttcctgcggacgatcgcatcttgtgtcgctgaagcgcctcccccagggaccggcggaccccagccatccagggggcaagaggaattacgtgctctgtgggtctcccccaacgcgcctcgccggatctgagggagaacaagaccgatcggcggccactgcgcccttaactgcatccagcctggggctgaggctgaggcactggcgaggagagggcgctcctctctgcacacctactagtcaccagagactttagggggtgggattccactcgtgtgtttctattttttgaaaagcagacattttaaaaaatggtcacgtttggtgcttctcagatttctgaggaaattgctttgtattgtatattacaatgatcaccgactgaaaatattgttttacaatagttctgtggggctgtttttttgttattaaacaaataatttagatggtgaaaaaaaaaa

SEQ ID NO: 50 - DNA, 60 bp, Homo sapiens
cagagactttagggggtgggattccactcgtgtgtttctattttttgaaaagcagacatt

SEQ ID NO: 51 - DNA, 4068 bp, Homo sapiens
aagtgacccagggagacaaacacttggagatacttggggctgagtttgagcaagactccctaacctgtgtctggacaagtctgatgtcctgtgtggcccaagaagaactgaccccgtgtctggagctcccaccgttattgcatccctgctgtggctcacctgctgctgtctccaggagcccctgagaagatttgcctcctctcccctgctaagctccaggtcctgagattgaattaggggctggagctcactgcactccagcagtcatgggacccaggatagggccagcgggtgaggtaccccaggtaccagacaaggaaaccaaagccacaatgggcacagaaaacacacctggaggcaaagccagcccagaccctcaggacgtgcggccaagtgtgttccataacatcaagctgttcgttctgtgccacagcctgctgcagctggcgcagctcatgatctccggctacctaaagagctccatctccacagtggagaagcgcttcggcctctccagccagacgtcggggctgctggcctccttcaacgaggtggggaacacagccttgattgtgtttgtgagctattttggcagccgggtgcaccgaccccgaatgattggctatggggctatccttgtggccctggcgggcctgctcatgactctcccgcacttcatctcggagccataccgctacgacaacaccagccctgaggatatgccacaggacttcaaggcttccctgtgcctgcccacaacctcggccccagcctcggccccctccaatggcaactgctcaagctacacagaaacccagcatctgagtgtggtggggatcatgttcgtggcacagaccctgctgggcgtgggcggggtgcccattcagccctttggcatctcctacatcgatgactttgcccacaacagcaactcgcccctctacctcgggatcctgtttgcagtgaccatgatggggccaggcctggcctttgggctgggcagcctcatgctgcgcctttatgtggacattaaccagatgccagaaggtggtatcagcctgaccataaaggacccccgatgggtgggtgcctggtggctgggtttcctcatcgctgccggtgcagtggccctggctgccatcccctacttcttcttccccaaggaaatgcccaaggaaaaacgtgagcttcagtttcggcgaaaggtcttagcagtcacagactcacctgccaggaagggcaaggactctccctctaagcagagccctggggagtccacgaagaagcaggatggcctagtccagattgcaccaaacctgactgtgatccagttcattaaagtcttccccagggtgctgctgcagaccctacgccaccccatcttcctgctggtggtcctgtcccaggtatgcttgtcatccatggctgcgggcatggccaccttcctgcccaagttcctggagcgccagttttccatcacagcctcctacgccaacctgctcatcggctgcctctccttcccttcggtcatcgtgggcatcgtggtgggtggcgtcctggtcaagcggctccacctgggccctgtgggatgcggtgccctttgcctgctggggatgctgctgtgcctcttcttcagcctgccgctcttctttatcggctgctccagccaccagattgcgggcatcacacaccagaccagtgcccaccctgggctggagctgtctccaagctgcatggaggcctgctcctgcccattggacggctttaaccctgtctgcgaccccagcactcgtgtggaatacatcacaccctgccacgcaggctgctcaagctgggtggtccaggatgctctggacaacagccaggttttctacaccaactgcagctgcgtggtggagggcaaccccgtgctggcaggatcctgcgactcaacgtgcagccatctggtggtgcccttcctgctcctggtcagcctgggctcggccctggcctgtctcacccacacaccctccttcatgctcatcctaagaggagtgaagaaagaagacaagactttggctgtgggcatccagttcatgttcctgaggattttggcctggatgcccagccccgtgatccacggcagcgccatcgacaccacctgtgtgcactgggccctgagctgtgggcgtcgagctgtctgtcgctactacaataatgacctgctccgaaaccggttcatcggcctccagttcttcttcaaaacaggttctgtgatctgcttcgccttagttttggctgtcctgaggcagcaggacaaagaggcaaggaccaaagagagcagatccagccctgccgtagagcagcaattgctagtgtcggggccagggaagaagccagaggattcccgagtgtgagctgtcttggggccccacctggccaagagtagcagccacagcagtacctcctctgagtcctttgcccaagattgggtgtcaagagccctgtgttccattctggctcctccactaaattgctgtgtgacttcaggcaagacattgatcctctctcagcctttgcttgctagtctgaaccaaagagttgtttgggcatttgctgtgttggccatttctggagcaagagggtcttcttcctccttcccccagccagccagctgtcctggggccaggctttcctgggtggaaagaagtatacctttccctggggccctaggatagcaaagtgagccatagtgggccaggctgccctccatgctgggccccagcccaggtctgcactcgcctggatcaccttctttgagccttagccatctcctgtcaggtaggaatgaacttgccagccttcaggctcgttcagctatgaccatctgtgcggtcagggtacactcagctctcctccccaactccagcagcctttaagaagtgtccctttggcgccccctggaggcagagcactgagctggaccctgggtagactcccacagggaggacggagctggcctcaggagtgggacacccagacttggcagggccttcaagaggcctgtgtgggggccccaggaatccttagctgaagcggggagactcactctccatctcaggaaattctagcccttgccctcagggagccacggttgagggtgaggcccaacacctgccttagggccctgggtgggcaagtctgggccctggggtagggagggagactcaggcccacacttgggtattttctaatttcagacaaacacacactcagcgcgcactcactgattcctacacattgccaagatttcacacatgtgaccaggggccaccaaagtccctgtgacctttgtgactaggatcctaatttctctattttctcctgggtgcctgggtctgtgtcacctggggcagtgtggataatgtttagttctgtgacactgttttttgggggtggcacctggttctccgatgcctgggctggtgtcaggcccaggactgtagtgctgggagcagtaaagctcagctctgtgtaatgagtgatgctatggcttgctcgtgtcttatgatccaatccttttctacatcagcccttgttttgttttatggctagtcttatctggcctggttatttccttgcggggaggagagggtttgctaatctgctcccagcccaacctattaccaccccacctcgctgggacctactgctcgggaggcagcagacagggagccaccagcagtggcttcctggccctgtgctgggggtggggggaagctgggggcacatgtggcccttgccttctgagcagctcccagtgccagggctttgagactttcccacatgataaaagaaaagggaggtacagaagttccaattccctttttattttgctggttggtatctgtaaatgtttaataaatatctgagcatgtatctatcaacgccaagaatttcaaagtctccttcaacaatatgaggcttttaggatgtttatattccttcatccctcttgtttcccaggttttgcagggaaaaaaagtctggaattatagatacagcttattattaaatttgttcttgcat

SEQ ID NO: 52 - DNA, 60 bp, Homo sapiens
tgctggttggtatctgtaaatgtttaataaatatctgagcatgtatctatcaacgccaag

SEQ ID NO: 53 - DNA, 1295 bp, Homo sapiens
cacgtcagccggggctagaaaaggcggcggggctgggcccagcgaggtgacagcctcgcttggacgcagagcccggcccgacgccgccatgagcgccgcgctcttcagcctggacggcccggcgcgcggcgcgccctggcctgcggagcctgcgcccttctacgaaccgggccgggcgggcaagccgggccgcggggccgagccaggggccctaggcgagccaggcgccgccgcccccgccatgtacgacgacgagagcgccatcgacttcagcgcctacatcgactccatggccgccgtgcccaccctggagctgtgccacgacgagctcttcgccgacctcttcaacagcaatcacaaggcgggcggcgcggggcccctggagcttcttcccggcggccccgcgcgccccttgggcccgggccctgccgctccccgcctgctcaagcgcgagcccgactggggcgacggcgacgcgcccggctcgctgttgcccgcgcaggtggccgcgtgcgcacagaccgtggtgagcttggcggccgcagggcagcccaccccgcccacgtcgccggagccgccgcgcagcagccccaggcagacccccgcgcccggccccgcccgggagaagagcgccggcaagaggggcccggaccgcggcagccccgagtaccggcagcggcgcgagcgcaacaacatcgccgtgcgcaagagccgcgacaaggccaagcggcgcaaccaggagatgcagcagaagttggtggagctgtcggctgagaacgagaagctgcaccagcgcgtggagcagctcacgcgggacctggccggcctccggcagttcttcaagcagctgcccagcccgcccttcctgccggccgccgggacagcagactgccggtaacgcgcggccggggcgggagagactcagcaacgacccatacctcagacccgacggcccggagcggagcgcgccctgccctggcgcagccagagccgccgggtgcccgctgcagtttcttgggacataggagcgcaaagaagctacagcctggacttaccaccactaaactgcgagagaagctaaacgtgtttattttcccttaaattatttttgtaatggtagctttttctacatcttactcctgttgatgcagctaaggtacatttgtaaaaagaaaaaaaaccagacttttcagacaaaccctttgtattgtagataagaggaaaagactgagcatgctcacttttttatattaatttttacagtatttgtaagaataaagcagcatttgaaatcg

SEQ ID NO: 54 - DNA, 60 bp, Homo sapiens
ggtagctttttctacatcttactcctgttgatgcagctaaggtacatttgtaaaaagaaa

SEQ ID NO: 55 - DNA, 391 bp, Homo sapiens
tcaagacccagcagtgggacagccagacagacggcacgatggcactgagctcccagatctgggccgcttgcctcctgctcctcctcctcctcgccagcctgaccagtggctctgttttcccacaacagacgggacaacttgcagagctgcaaccccaggacagagctggagccagggccagctggatgcccatgttccagaggcgaaggaggcgagacacccacttccccatctgcattttctgctgcggctgctgtcatcgatcaaagtgtgggatgtgctgcaagacgtagaacctacctgccctgcccccgtcccctcccttccttatttattcctgctgccccagaacataggtcttggaataaaatggctggttcttttgttttcc

SEQ ID NO: 56 - DNA, 60 bp, Homo sapiens
tatttattcctgctgccccagaacataggtcttggaataaaatggctggttcttttgttt

SEQ ID NO: 57 - DNA, 2956 bp, Homo sapiens
ttcttaaggcccaaatttttgtttttaagcaaaaggatagctctaagtgtgggttgcagttactggacataaatattcactaaatgagattcctttggttatggctgttcatagaattttaattctatgtcagtgttcttgttcactaagatatttcgaagtgagagaaagcattttaccaatacattcttattttttctcctttaaaataatattgaatttttcctggtacgaagacagatatttattaacttgattggaaaacacagaaattaagatcatgttgaacactgagttatctagatgatccctgagatttgaatgttcatgtcaaccgtgttgagcgctcaccagccaccaggctttaggcactggcagtgcaaggtgtctgaggcccattctcaggctgggcagaggtcacacagtgagtaaatgggtcttttcagtgcaatgtggttatgatagaggcatgccagggtgccactaacccagcaggtgtggcaggaggggcttcacagaggaaagggactttgagctcagtgttaaaggatgaggagtgagtcataagggggaaaaatggaaatgactttccaggcttcagaaacagcataaacaaacaaaggcctgagagctggagtcagtgtggtgtgtccagggatcacaagtgggctggagctgccggagaacagccaagtggctcagctgccatcccagaattgagctcgtcactatcagatgctgctgctccctggcctcagaggaaagcagcacacagctcaccacgaggggtttccccagaggctcctcctgcagccaatgctactattagtttatattataatagtatcagtttctttttctttggaaatccctagaactgttaactgaaggtgactcagggtaactaattctggatctttgggtgcacagcctctcactggagtctgagaggaggaggtggagactatcagtgcacggcccgcaaccaggaaggactcccagactaacgccaaaggtgtgttgggctcagctgctccactgtggaaaaggaaagccctggccctgtggcaggagaggattgttctagtcaagtgtggcgttgcacggacaggcggtgccgagtgtttgggtgcagacacaggcagctgctgccctccacttcctgctcttgcaagtcacagatgattccagtacaatgtgggaggtcctccttacaggggcacttgcaacaggaaggcagagagtttcgtcaattcaggtacaggtctgtctgggagacctggccctgtggaggcaggaacaccgtgcaggggcatggcagcgcctgtctttgctatcacatcatttgccttttccttgtaggacccaaagatctatgtccaaaacttagtccagaaacatctgcattcctgtttaaacttcagctcagtttcttaaccaagaaccacgtcaaccctccagggttgtggtttgtatttttgcctttaagcattatctcctttccaccaagaagcctacttaggtttaacacatgaaagcagtgtctaaaaattagatcggtcctaaattggaatgggatgtcttccttgcatgtcccataccagggaattttttttaacacacagtgtggagcctttgccagagatgttgaaagggagattaaaggcttgagggatgaatttgatcatcattcttaaagtcccttccaatcctgtgattctctgattccctgagtctcgtttattattggacatgcctagcccatcaccagtgacctgcccgcatattgctggcttcccttggataacggagagcctatcaccacatgcctttgttgtcttccatcatatcaagtgagttgctttctggactttttccatctagagcctgctaggtttggttttgagaaaagatggtgaagtttcttttcatgagtttgtagggcaaaaaaaaaattctttttaaagatggtaagggtggaaattaatcatggtaccatctcattaaaaatagatacctcaaaatgtttacctttacaagtcaagaagagtatctgactttcttggaagtgtcaagaattgcaggttggctgaaaagttagattgagaatctgaccttgttacttatgattcttttttcccttggttctcggggatgcatgagaaggtgagctgtcactcacaaaaaaagggaaaatgatttgaaaaatgtttcacatatacactttttatcattttagtggatggcagccttacgtcagtagtatatgccactatgaagtatggccaaaaccctagcgtcacttgtaaccattgtactcttatggatttgtgtcttacaccatttgccttgctttttaaatgactttgtttttcaaggtgctgtcattttgcaaaaggaaatctttatatgaaatgtacaaaaaccgttactaattggacaacagggaaggtgctggccccacattagtgcctgcccactgctctacttctaaccagggacacggatcttccattctctacatccaccggactgcagcccaagtctggacctggctgcagtgggcatattaccgtatggatatctttttctttctttttttaaagtgaggagattcttcagggggtcaggctgagaatgtaataagcctgacattggaacagatttctcccgtgtggtctagctggacccctccggcatttgccacactccctgccagtcctgacattgacttcctgaatgtgatcaggtggtaatgagcaagaatttcctaggatgttgaaacatctgtatccaggcccccaatcaaatgctgctgaatattgtgaatgtttttactccgctcactttcccactgtgctttcctctaaccaaaatatacgtgtagccattaccaatgtacaactctcaatgcggagttgccgccacggtttaaaataaatctctgtgaaaacct

SEQ ID NO: 58 - DNA, 60 bp, Homo sapiens
tttcctctaaccaaaatatacgtgtagccattaccaatgtacaactctcaatgcggagtt

SEQ ID NO: 59 - DNA, 2825 bp, Homo sapiens
gatgttaaaactgcagtagaatgaaatgagtcagggagcttcagttagaaaataaagttgaggcagtttttgtgaagataatatggttagggctggagtgcactagtctttttgcttattcattttgcatggttttaaaattaaaaataattccgaagatacaccagctcacaaatgaaaacgtcagcctctgccccaccctccctcctgcccaaagtgaatttggtactcagaaaagaactgtttataccactcacctttctcccagcatgtactcactgtgggcagatgcaccaatacatggtaatcctcttactcattttaagacgtaggaaactcaatattcttctctaaccatatacgatagggctcttcgcttttaatgatatctgggatttctgtggaacttggcaaattttcagagcaccttcactcacataatgtcatttgaacctcacaatgttcttgggatggagtcagttgttcagggtccccgtgtgtgtgataagcagtgctggctggctgtcttcagaactcttggaaatctttacacatgcgagtgctaaccactttgagcaaggctgccttcttgtagatgacttgctgttctttatgacagggatcagtggcatttgtttcctagcagtatttagcacctttttgccaccttggtgaacagaaaattgtattttcctgtctttcatggctgaaaacaaaagtaatgggaattttaaatacgtttgcagaaactgcccctcccctcattgagggtcactgctcaagagtgcaggagtggactctccactgatgggtctccctccccatcctggtttccaccccgggctggctagctctgttggtttgaagactgacagccagcctggctcattctcattattggctagttagctttctttatcaacctgctcactcacaaatgtgtgccctcagccagagagtaagaaagcccaaatctgttacagcttctaaaaaaatagatttctaatttgtcctactcatgttaggagcattatctttgaaggtaaaacatagtgtatcattgtgtaaactcccaggcttgatgtagcagaagagatcatttctggaggcttcagcaatggaatttagcattataagagagattggacaaaccagtccaaagtggtccgagttcttaaatccaggtagggaactcactcttctttcttctctggacctaattgggcattgggctttagtgagaccacagaccaggcccgtctctcctgtaggcttttaattcaatggcaactctatttcaaagaataaaagcctttggagagttgcggcagttctgggggcgggctcaggagagtccatagatcagccgtaactggaacgtagaatctacgtctgcctctgaatggacttcccacctcctctctcttgctctgatgcttgcctctgggcctctccatgcccaaggtggtctttcatccttgacaggctggtaatgtgctggccacctccagctcctgcatcgagtctgtaaaccagagctggttctcatggccttcgtcacgataccaggatacggaggggagcccagggccatccatacccaccccagggtaacggggctggcctggcattagtcattatttagtttccaggccaaccatccagatagagattccctctttcctttgagcagtgctctcaagagctccgtgcttgtccacaatgacctagagtgcatcctgctcattgtcagtgtagcccctcgcccctatattcatccaggatacttggaagtgctaaaataggaagggattcggctttcaactttgctaccatcttccctgaagcaggaaaatgaacatggacttaaatgttctttgaaaaaaccaaagttttaagatttgctgtgtgatgaagtgacagggagggccggagtcagcaggtgccagactttctgttctgtctgccatgggtttgtccagctcaggtagctctaggagcaccatcctgccctagcagagcccaggccttgccctcatgaagcatcattgaaatagcaggagcatgttgatttcttggttaggttgcattataataacaagagtcagaacattaattcgaaacaacttgcagtatgcatttcttcacaccagtacattcttaagtgtacttgtttataaggaataacataaactaatctgtacctttatatatatgtgtgtgtacatatatacatatataaactgtatagtgtacatggtaatgatttattgctatgccccagatccttaatgtagttctcatcctccgcatgccctcagccacaagcgggtgactgactgttccctgatgatttggcccacctcctgtgtttggacctctagggaggagggttttggtcatactctccttatcctcgtgcacagaaatgctcagggtccccatgtgcctgttgttcagccctctctcttgttccctttctgagcatgtggtccttccccaggctgtgggacagctgccttcccacgaaagtgtaaagcagtattaagatcattactgcatgtgccctaaaaacccaagttttctattcccttaggacagaaaattgcatgtgaggtgggataatcgagtttcagtgacccacgtcagttacacattaaagccagaccccatgataaaattccacaaaatggaaataaaactcaaatttctttagcattgtgtaaataaatctgaatgtgtttaactttgtactggtaattttctgtatatttggaatatttgggttaaaaataaaacagactggactttgttacctgacctac

SEQ ID NO: 60 - DNA, 60 bp, Homo sapiens
ctattcccttaggacagaaaattgcatgtgaggtgggataatcgagtttcagtgacccac

SEQ ID NO: 61 - DNA, 3228 bp, Homo sapiens
aaaaaactcaggcaaagtcacagcctcaaaattgttcactgaaagaacgctgagtggagaagtgtgagaagatgaatggaccggtggatggcttgtgtgaccactctctaagtgaaggagtcttcatgttcacatcggagtctgtgggagagggacacccggataagatctgtgaccagatcagtgatgcagtgctggatgcccatctcaagcaagaccccaatgccaaggtggcctgtgagacagtgtgcaagaccggcatggtgctgctgtgtggtgagatcacctcaatggccatggtggactaccagcgggtggtgagggacaccatcaagcacatcggctacgatgactcagccaagggctttgacttcaagacttgcaacgtgctggtggctttggagcagcaatccccagatattgcccagtgcgtccatctggacagaaatgaggaggatgtgggggcaggagatcagggtttgatgttcggctatgctaccgacgagacagaggagtgcatgcccctcaccatcatccttgctcacaagctcaacgcccggatggcagacctcaggcgctccggcctcctcccctggctgcggcctgactctaagactcaggtgacagttcagtacatgcaggacaatggcgcagtcatccctgtgcgcatccacaccatcgtcatctctgtgcagcacaacgaagacatcacgctggaggagatgcgcagggccctgaaggagcaagtcatcagggccgtggtgccggccaagtacctggacgaagacaccgtctaccacctgcagcccagtgggcggtttgtcatcggaggtccccagggggatgcgggtgtcactggccgtaagattattgtggacacctatggcggctggggggctcatggtggtggggccttctctgggaaggactacaccaaggtagaccgctcagctgcatatgctgcccgctgggtggccaagtctctggtgaaagcagggctctgccggagagtgcttgtccaggtttcctatgccattggtgtggccgagccgctgtccatttccatcttcacctacggaacctctcagaagacagagcgagagctgctggatgtggtgcataagaacttcgacctccggccgggcgtcattgtcagggatttggacttgaagaagcccatctaccagaagacagcatgctacggccatttcggaagaagcgagttcccatgggaggttcccaggaagcttgtattttagagccagggggagctgggcctggtctcaccctggaggcacctggtggccatgctcctcttccccagacgcctggctgctgatcgccttccccacccaccaaccctcagggcaaagccaggtccctctcatttagcctgtcctgtcatcatcatggccagctggaggcaggggcttcctggtgctggaggttggatcttgatgtaaggatgggcatggtgttctcctgctgctccctcagactggggcaatgttaatttagtggaaaaggcacccccgtcaagagtgaattccctcactcgtctcccccaacagctggaccctgaccagctccccctccctccccttgcctgtgccaggtgaggtcagcacatctcaacaggcctcagggctccttgtgggcctgggctcctggacccccctttcacaggcagccagtgccctgagccagggtctccagaaagccccacccaggccaggcatgtggcaggggttagagcaggactgatgtctcctaagcacctgtaatgtgcgagggacccagctaataactgatctcgttttttcttcactgcaacatgatgaggtagtaccttttatatcccatttatagatgggggaaagcaaagcacagagagtctggataacttccacagggtcccacagccacgtgtttagacctagatgtataactaggagctttgactcaggagcctgtgacatacccccttccccaccgttgtctcatgccagtaacaggctcaaacaatgacaaagcagattcagaaatgaggccatggactctgtcctgaaggcctgaggttactggaaattaggggattaacccactagctcttgttgagccgtgggcaattgtctgaaaagtgaagacagaaccacagggctattttgtttgcttcatgtgtcccagaagatgactgagggtgagttggcttacctggcccatcagggtaggctggagttagggactgaccagcagctttagaatcccagccccctgaccactcagagacatgcagagattgggtttttggacttctggggtaagtggtctaagtccagtccagtcctatgtgggcttcctggagcagaagcagcaacttgtcctagcacagatggccagccccttagacagaggccctcaagtctttctctttccctggtcccttgtatcccctgcaggctgagtgcatttggagggagtgagtggccctttcggatccagggaggctggtcctatggcctcatgttaaataggcggggcttgccttctggtgttggacaagcttctgagacgtcatgaggagattctgcctttgccaggtgactgtctggggagcgggtctgctcccaaggggcctgagcagtccttggcctgctaaggtcttggaacttgcctgcctttccatccatggccagcagcacctgccctacctgccccacttgtccttagcctggacctctgacagcagcatctctaccttctccccagctcccaggaccacaggctcaggcagggcctccatgggccccaggggaacactggggacttggcctctctctagggtacatggtgctgggagaggcagcccaggaagtctcatctggggagcaggcagccagcatctgggccttggcctggagcacaaagaccctggctttcattttctctcaggtgaaaggaaattaaggcaacaaaagaagcccggctcctggtcacctaggaagcctcagattccttcccatggagggagggagtggtttgcaggtggccaagttcctctaacttggctcacactcgacatgaaaattcagaattttatactttccctaccctctagagaaataagatcttttttgtcagtttgtttgtatgaaactaaagctttatttgttaatagttcctgctaaaacaatgaataaaaactcaaggagcaactaaaaaaaaaaa

SEQ ID NO: 62 - DNA, 60 bp, Homo sapiens
cacactcgacatgaaaattcagaattttatactttccctaccctctagagaaataagatc

SEQ ID NO: 63 - DNA, 1220 bp, Homo sapiens
agccaggctagtgacagaaatggattcgaaatatcagtgtgtgaagctgaatgatggtcacttcatgcctgtcctgggatttggcacctatgcgcctgcagaggttcctaaaagtaaagctttagaggccaccaaattggcaattgaagctggcttccgccatattgattctgctcatttatacaataatgaggagcaggttggactggccatccgaagcaagattgcagatggcagtgtgaagagagaagacatattctacacttcaaagctttggtgcaattcccatcgaccagagttggtccgaccagccttggaaaggtcactgaaaaatcttcaattggattatgttgacctctaccttattcattttccagtgtctgtaaagccaggtgaggaagtgatcccaaaagatgaaaatggaaaaatactatttgacacagtggatctctgtgccacgtgggaggccgtggagaagtgtaaagatgcaggattggccaagtccatcggggtgtccaacttcaaccgcaggcagctggagatgatcctcaacaagccagggctcaagtacaagcctgtctgcaaccaggtggaatgtcatccttacttcaaccagagaaaactgctggatttctgcaagtcaaaagacattgttctggttgcctatagtgctctgggatcccaccgagaagaaccatgggtggacccgaactccccggtgctcttggaggacccagtcctttgtgccttggcaaaaaagcacaagcgaaccccagccctgattgccctgcgctaccagctacagcgtggggttgtggtcctggccaagagctacaatgagcagcgcatcagacagaacgtgcaggtgtttgaattccagttgacttcagaggagatgaaagccatagatggcctaaacagaaatgtgcgatatttgacccttgatatttttgctggcccccctaattatccattttctgatgaatattaacatggagggcattgcatgaggtctgccagaaggccctgcgtgtggatggtgacacagaggatggctctatgctggtgactggacacatcgcctctggttaaatctctcctgcttggtgatttcagcaagctacagcaaagcccattggccagaaaaaaaagacaataattttgttttttcattttgaaaaaattaaatgctctctcctaaagattcttcacctaaaaaa

SEQ ID NO: 64 - DNA, 60 bp, Homo sapiens
cccctaattatccattttctgatgaatattaacatggagggcattgcatgaggtctgcca

SEQ ID NO: 65 - DNA, 1554 bp, Homo sapiens
ggccattaccaatcgcgaaaccccgcagggggctcccggaccctgactctgcagccgaaccggcacggtttcctggggacccaggcttgcaaagtgacggtcattttctccttctttctccctcttgagtccttctgagatgatggctctgggcgcagcgggagctacccgggtctttgtcgcgatggtagcggcggctctcggcggccaccctctgctgggagtgagcgccaccttgaactcggttctcaattccaacgctatcaagaacctgcccccaccgctgggcggcgctgcggggcacccaggctctgcagtcagcgccgcgccgggaatcctgtacccgggcgggaataagtaccagaccattgacaactaccagccgtacccgtgcgcagaggacgaggagtgcggcactgatgagtactgcgctagtcccacccgcggaggggacgcgggcgtgcaaatctgtctcgcctgcaggaagcgccgaaaacgctgcatgcgtcacgctatgtgctgccccgggaattactgcaaaaatggaatatgtgtgtcttctgatcaaaatcatttccgaggagaaattgaggaaaccatcactgaaagctttggtaatgatcatagcaccttggatgggtattccagaagaaccaccttgtcttcaaaaatgtatcacaccaaaggacaagaaggttctgtttgtctccggtcatcagactgtgcctcaggattgtgttgtgctagacacttctggtccaagatctgtaaacctgtcctgaaagaaggtcaagtgtgtaccaagcataggagaaaaggctctcatggactagaaatattccagcgttgttactgtggagaaggtctgtcttgccggatacagaaagatcaccatcaagccagtaattcttctaggcttcacacttgtcagagacactaaaccagctatccaaatgcagtgaactccttttatataatagatgctatgaaaaccttttatgaccttcatcaactcaatcctaaggatatacaagttctgtggtttcagttaagcattccaataacaccttccaaaaacctggagtgtaagagctttgtttctttatggaactcccctgtgattgcagtaaattactgtattgtaaattctcagtgtggcacttacctgtaaatgcaatgaaacttttaattatttttctaaaggtgctgcactgcctatttttcctcttgttatgtaaatttttgtacacattgattgttatcttgactgacaaatattctatattgaactgaagtaaatcatttcagcttatagttcttaaaagcataaccctttaccccatttaattctagagtctagaacgcaaggatctcttggaatgacaaatgataggtacctaaaatgtaacatgaaaatactagcttattttctgaaatgtactatcttaatgcttaaattatatttccctttaggctgtgatagtttttgaaataaaatttaacatttaatatcatgaaaaaaaaaaaaaaaaaaaaaaaaaaaaaaaaaaaaaa

SEQ ID NO: 66 - DNA, 60 bp, Homo sapiens
gatgctatgaaaaccttttatgaccttcatcaactcaatcctaaggatatacaagttctg

SEQ ID NO: 67 - DNA, 784 bp, Homo sapiens
gggggttgggcctgcagaatcccctgcagcattttcctgtaatctggatgagcgatcttcaaacgtgtgctttcaaactacttaaataccatattcttcctatcttgcctttcatttttatattaccacagatactttcctcatagtcttgccagtgcttgtagaatgcttagaaaaagcttgataaaccactgggctaagtacacagagggagaggctagcagtatttttaaattggtttctaaattttttatagcttgatggtagataacacatttgcttcattgaagtaatctgaaaaaccaatcctcaaaagacctctcaattagaattcttaaatgacaatgttttctttatcatatatttgagagattgatttaaagaaaaataatgcttgactatctgaaataatattttaaccctatcataaaatctctgcctggtagaacagctgactgtggaagggtaaaatgcagagaaccagtcattggatctcccttctctactttgttactgaaatcttgaacctgtagaacatttacttatcactgtgttcctttctaatgggaaaataataataaacacttgcagagtatttttaaaagtttttagctttaaaaaaaaaaaccctgtgccttacacaatgtgtatatcgagttgatactgattatgatacattagatggtattatacaatcattcattcagcaaacattcaccttactgagcacctactatgtccaggtactgatcgtccaaccgtgttgggacacaggctctgtcct

SEQ ID NO: 68 - DNA, 60 bp, Homo sapiens
cctgagcttagtctagtaggaggtgacagatttgtaaataatagatttgaagttgctgag

SEQ ID NO: 69 - DNA, 4656 bp, Homo sapiens
ggctggagcggcggcgggcaggcgtgcggaggacactcctgcgaccaggtactggctgtgatcgaacttctcaaccctcagagacttagatcttccacctcactccctcagccaagcctccaggccccctcgtgcatccgtggtggcctctctgccttctctgttctgttctccccatggcccagacatgagtggccccctagaaggggctgatgggggaggggaccccaggcctggggaatcattttgtcctgggggcgtcccatcccctgggcccccacagcaccggccttgcccaggccccagcctggccgatgacaccgatgccaacagcaatggttcaagtggcaatgagtccaacgggcatgagtctagaggcgcatctcagcggagctcacacagctcctcctcaggcaacggcaaggactcagccctgctggagaccactgagagcagcaagagcacaaactctcagagcccatccccacccagcagttccattgcctacagcctcctgagtgccagctcagagcaggacaacccgtccaccagtggctgcagcagtgaacagtcagcccgggcaaggactcagaaggaactcatgacagcacttcgagagctcaagcttcgactgccgccagagcgccggggcaagggccgctctgggaccctggccacgctgcagtacgcactggcctgtgtcaagcaggtgcaggccaaccaggaatactaccagcagtggagcctggaggagggcgagccttgctccatggacatgtccacctataccctggaggagctggagcacatcacgtctgagtacacacttcagaaccaggataccttctcagtggctgtctccttcctgacgggccgaatcgtctacatttcggagcaggcagccgtcctgctgcgttgcaagcgggacgtgttccggggtacccgcttctctgagctcctggctccccaggatgtgggagtcttctatggttccactgctccatctcgcctgcccacctggggcacaggggcctcagcaggttcaggcctcagggactttacccaggagaagtccgtcttctgccgtatcagaggaggtcctgaccgggatccagggcctcggtaccagccattccgcctaaccccgtatgtgaccaagatccgggtctcagatggggcccctgcacagccgtgctgcctgctgattgcagagcgcatccattcgggttacgaagctccccggataccccctgacaagaggattttcactacgcggcacacacccagctgcctcttccaggatgtggatgaaagggctgcccccctgctgggctacctgccccaggacctcctgggggccccagtgctcctgttcctgcatcctgaggaccgacccctcatgctggctatccacaagaagattctgcagttggcgggccagccctttgaccactcccctatccgcttctgtgcccgcaacggggagtatgtcaccatggacaccagctgggctggctttgtgcacccctggagccgcaaggtagccttcgtgttgggccgccacaaagtacgcacggcccccctgaatgaggacgtgttcactcccccggcccccagcccagctccctccctggacactgatatccaggagctgtcagagcagatccaccggctgctgctgcagcccgtccacagccccagccccacgggactctgtggagtcggcgccgtgacatccccaggccctctccacagccctgggtcctccagtgatagcaacgggggtgatgcagaggggcctgggcctcctgcgccagtgactttccaacagatctgtaaggatgtgcatctggtgaagcaccagggccagcagctttttattgagtctcgggcccggcctcagtcccggccccgcctccctgctacaggcacgttcaaggccaaggcccttccctgccaatccccagacccagagctggaggcgggttctgctcccgtccaggccccactagccttggtccctgaggaggccgagaggaaagaagcctccagctgctcctaccagcagatcaactgcctggacagcatcctcaggtacctggagagctgcaacctccccagcaccactaagcgtaaatgtgcctcctcctcctcctataccacctcctcagcctctgacgacgacaggcagaggacaggtccagtctctgtggggaccaagaaagatccgccgtcagcagcgctgtctggggagggggccaccccacggaaggagccagtggtgggaggcaccctgagcccgctcgccctggccaataaggcggagagtgtggtgtccgtcaccagtcagtgtagcttcagctccaccatcgtccatgtgggagacaagaagcccccggagtcggacatcatcatgatggaggacctgcctggtctagccccaggcccagcccccagcccagcccccagccccacagtagcccctgacccagccccagacgcctaccgtccagtggggctgaccaaggccgtgctgtccctgcacacgcagaaggaagagcaagccttcctcagccgcttccgagacctgggcaggctgcgtggactcgacagctcttccacagctccctcagcccttggcgagcgaggctgccaccacggccccgcacccccaagccgccgacaccactgccgatccaaagccaagcgctcacgccaccaccagaaccctcgggctgaagcgccctgctatgtctcacacccctcacccgtgccaccctccaccccctggcccaccccaccagccactacccccttcccagcggttgtccagccctaccctctcccagtgttctctcctcgaggaggcccccagcctcttccccctgctcccacatctgtgcccccagctgctttccccgcccctttggtgaccccaatggtggccttggtgctccctaactatctgttcccaaccccatccagctatccttatggggcactccagacccctgctgaagggcctcccactcctgcctcgcactccccttctccatccttgcccgccctccccccgagtcctcctcaccgcccggactctccactgttcaactcgagatgcagctctccactccagctcaatctgctgcagctggaggagctcccccgtgctgagggggctgctgttgcaggaggccctgggagcagtgccgggcccccacctcccagtgcggaggctgctgagccagaggccagactggcggaggtcactgagtcctccaatcaggacgcactttccggctccagtgacctgctcgaacttctgctgcaagaggactcgcgctccggcacaggctccgcagcctcgggctccttgggctctggcttgggctctgggtctggttcaggctcccatgaagggggcagcacctcagccagcatcactcgcagcagccagagcagccacacaagcaaatactttggcagcatcgactcttccgaggctgaggctggggctgctcggggcggggctgagcctggggaccaggtgattaagtacgtgctccaggatcccatttggctgctcatggccaatgctgaccagcgcgtcatgatgacctaccaggtgccctccagggacatgacctctgtgctgaagcaggatcgggagcggctccgagccatgcagaagcagcagcctcggttttctgaggaccagcggcgggaactgggtgctgtgcactcctgggtccggaagggccaactgcctcgggctcttgatgtgatggcctgtgtggactgtgggagcagcacccaagatcctggtcaccctgatgacccactcttctcagagctggatggactggggctggagcccatggaagagggtggaggcgagcagggcagcagcggtggcggcagtggtgagggagagggctgcgaggaggcccaaggcggggccaaggcttcaagctctcaggacttggctatggaggaggaggaagaaggcaggagctcatccagtccagccttacctacagcaggaaactgcaccagctagactccattctgggaccatctccaggagtccatgagaggctttcttctcctatgtcccaattctcagaactcagatgtggctagaccaaccagtgggaaactgccccagcttctcccaccatagggggccggacccccatcaccagcctaggatccaggggctgcctctggcctcttagggagcagagagcagaactccgcagcccagcccagaggagtgtcacctcccacctttggagaggaatccttccctcccctggacaaagttgctgacaagctgctgaagtggcctctccatattccagctgagcctgaatctgactcttgagggttggggctgcacttatttattgcggggagacagctctctctcccacctcctccccagatgggaggagagcctgaggcccaagcaggacccgggggttccagcccctagctgctctggagtgggggaggttggtggaccatggagtccctggtgctgcccctcaggtgggacccaggggttctcagctgtaccctctgccgatggcatttgtgtttttgatatttgtgtctgttactacttttttaatacaaaaagataaaaacgcc

SEQ ID NO: 70 - DNA, 60 bp, Homo sapiens
gatggcatttgtgtttttgatatttgtgtctgttactacttttttaatacaaaaagataa

SEQ ID NO: 71 - DNA, 2576 bp, Homo sapiens
aaagcttgctagattaactattgatacacaagcttaaataggtagtaaaccactaaatatgcaaggaagtgattatcagggttgtgaaggagaagaacaggtaagttaaatgggcattctgaggagtagaaatttcctttacttcataattatttgttaattcatctttatatgtttaatgggcttttctctattattttatatttttcaataaaagaaaaaagaatttaaaaaatcttggagctcactgggagcaatggggttgcagctgaagtccaatagtacaaatgatgtggtaagaggccggcagggctgtgaattacagcaacaaaggagaaaaggaagtgattggagaattaagcaacatgaatggtattattcaaagacagctcattataggacacggaactccctgggtaggagtttgaagctttcttaactcagaaagaaacttccaacacagtttcccaaagaaaaatgggcaccaagggcaaagttattaaatgcaaagcagccatcgcctgggaagcaggcaagcccctttgcattgaagaggttgaagtagctccccccaaggctcatgaagttcgcattcagatcattgctacctccctgtgccatactgatgccagtgttatcgattctaaatttgagggcctagctttcccagtgatcgttggccatgaggctgcaggtattgtggaaagtattgggccaggagtgaccaacgtcaaaccaggtgacaaagtaattccactttatgcacctctatgtagaaaatgcaagttttgtctgagtccactcacaaatttgtgtgggaaaatcagtaatctcaaaagtcctgctagtgatcaacaactaatggaagacaaaaccagcaggtttacctgcaaaggaaaaccagtttaccatttctttggaaccagtacattctctcagtacactgtggtgtcagatatcaatcttgccaaaatagatgatgatgcaaatttagagagagtttgtctgcttggatgtgggttttcaactggctatggggctgcaatcaacaatgccaaggtcacccctggttcgacttgtgctgtctttggcctaggaggtgtgggtctttctgctgtaatgggttgtaaagcagcaggagcttccagaatcataggtattgacatcaacagtgagaagtttgtgaaggctaaagccctgggagccactgactgcctcaatcctagagacttacataaaccgatccaggaagttatcattgaattgaccaagggaggtgtggattttgcccttgactgtgcaggtggatctgaaaccatgaaagcagccctggactgtacaaccgcaggctggggatcatgtactttcattggagtagctgctggtagcaaaggattgactatttttccagaggagctaataatcggccgtactataaatggaacattctttggtggttggaaaagtgtagattctatcccaaagctggtcactgactataagaataagaaattcaatctggatgcattggtgacccataccctgccttttgacaaaatcagtgaggcatttgacctaatgaaccaaggaaaaagcgtccgaacaatcctcatctttggaagatgccaggagcaattcagaatactatctgattgaatgtgaacctgcctggttaatttattacctgatttgatgaaccaaggaaagccatgagtttaaacaaatatttacatttaatatgggaacataaaagagctttaaatattatagactttgtacctgttatatatatgaatattccctatgttaaataataataataactagtgtttatgaatagaatcatatcatctttagaaattgtttaaaattagttctgggaagttgaaagtggggaatgaagagataataaataaaactagattggccatatgtttataatttttttagattgggtaatgaatacatggagtttcattatacttttctctccacgttttgtctatgttgaaaattttctgggagctaaatgatgagaacacatggacacatgatggggaacaacacacactggggcctgttgagggcagggagtcggcagagagagagcatcaggaagaatagctaatggatgctgggcttcatacctgggtgatgagatgatctgtgcagcaaagcaccatggtacatgtttacctatgtaacaaacctgcacatcctgcacatgtaccctggaacttaataaaagttggaaatttttaaaaagaatgaataagacctggtatttgatagcacaacagggagactatagtcaacagcaatttaattgtatattttaatatgactaaaagagtataatggattgtttgtaacacaaataaatgcttgaggagatggagaccccatattacatgatgtgattattacacattgcatgcctatatcaaaacatctcatgtaccccatccctatatacacctaatacccacaaaacttaaaatataaatgttttaaataaaaataaagaaaagatttccacaataaaaagatttttactggaaaaaatcacattattt

SEQ ID NO: 72 - DNA, 60 bp, Homo sapiens
ccctgccttttgacaaaatcagtgaggcatttgacctaatgaaccaaggaaaaagcgtcc

SEQ ID NO: 73 - DNA, 2430 bp, Homo sapiens
ctccaccgccgccgccgccgccgccgctgccgctgccgctgccgcacctccgtagctgactcggtactctctgaagatggcagaagctcaccaagctgtggcctttcagttcacggtcactccggacgggattgacctgcggctgagccatgaagctcttagacaaatctatctctctggacttcattcctggaaaaagaagttcatcagattcaagaacggcatcatcactggcgtgtacccggcaagcccctccagttggcttatcgtggtggtgggcgtgatgacaacgatgtacgccaagatcgacccctcgttaggaataattgcaaaaatcaatcggactctggaaacggccaactgcatgtccagccagacgaagaacgtggtcagcggcgtgctgtttggcaccggcctgtgggtggccctcatcgtcaccatgcgctactccctgaaagtgctgctctcctaccacgggtggatgttcactgagcacggcaagatgagtcgtgccaccaagatctggatgggtatggtcaagatcttttcaggccgaaaacccatgttgtacagcttccagacatcgctgcctcgcctgccggtcccggctgtcaaagacactgtgaacaggtatctacagtcggtgaggcctcttatgaaggaagaagacttcaaacggatgacagcacttgctcaagattttgctgtcggtcttggaccaagattacagtggtatttgaagttaaaatcctggtgggctacaaattacgtgagcgactggtgggaggagtacatctacctccgaggacgagggccgctcatggtgaacagcaactattatgccatggatctgctgtatatccttccaactcacattcaggcagcaagagccggcaacgccatccatgccatcctgctttacaggcgcaaactggaccgggaggaaatcaaaccaattcgtcttttgggatccacgattccactctgctccgctcagtgggagcggatgtttaatacttcccggatcccaggagaggagacagacaccatccagcacatgagagacagcaagcacatcgtcgtgtaccatcgaggacgctacttcaaggtctggctctaccatgatgggcggctgctgaagccccgggagatggagcagcagatgcagaggatcctggacaatacctcggagcctcagcccggggaggccaggctggcagccctcaccgcaggagacagagttccctgggccaggtgtcgtcaggcctattttggacgtgggaaaaataagcagtctcttgatgctgtggagaaagcagcgttcttcgtgacgttagatgaaactgaagaaggatacagaagtgaagacccggatacgtcaatggacagctacgccaaatctctactacacggccgatgttacgacaggtggtttgacaagtcgttcacgtttgttgtcttcaaaaacgggaagatgggcctcaacgctgaacactcctgggcagatgcgcagatcgtggcccacctttgggagtacgtcatgtccattgacagcctccagctgggctatgcggaggatgggcactgcaaaggcgacatcaatccgaacattccgtaccccaccaggctgcagtgggacatcccgggggaatgtcaagaggttatagagacctccctgaacaccgcaaatcttctggcaaacgacgtggatttccattccttcccattcgtagcctttggtaaaggaatcatcaagaaatgtcgcacgagcccagacacctttgtgcagctggccctccagctggcgcactacaaggacatgggcaagttttgcctcacatacgaggcctccatgacccggctcttccgagaggggaggacggagaccgtgcgctcctgcaccactgagtcatgcgacttcgtgcgggccatggtggacccggcccagacggtggaacagaggctgaagttgttcaagttggcgtctgagaagcatcagcatatgtatcgcctcgccatgaccggctctgggatcgatcgtcacctcttctgcctttacgtggtgtctaaatatctcgctgtggagtcccctttccttaaggaagttttatctgagccttggagattatcaacaagccagacccctcagcagcaagtggagctgtttgacttggagaataacccagagtacgtgtccagcggagggggctttggaccggttgctgatgacggctatggtgtgtcgtacatccttgtgggagagaacctcatcaatttccacatttcttccaagttctcttgccctgagacggattctcatcgctttggaaggcacctgaaagaagcaatgactgacatcatcactttgtttggtctcagttctaattccaaaaagtaattccactggagctgctgggaaggaaaacgagg

SEQ ID NO: 74 - DNA, 60 bp, Homo sapiens
gctgaccggtgcatgtaaatacagtatgctctttggatgtaaatcttagaaatgcagtgt

SEQ ID NO: 75 - DNA, 1698 bp, Homo sapiens
tcggcacaggagcgaggagacccgagagcagacgcgccctggcgcccgccctgcgcagtcaccatggcgatgcatttcatcttctcagatacagcggtgcttctgtttgatttctggagtgtccacagtcctgctggcatggccctttcggtgttggtgctcctgcttctggctgtactgtatgaaggcatcaaggttggcaaagccaagctgctcaaccaggtactggtgaacctgccaacctccatcagccagcagaccatcgcagagacagacggggactctgcaggctcagattcattccctgttggcagaacccaccacaggtggtacttgtgtcactttggccagtctctaatccatgtcatccaggtggtcatcggctacttcatcatgctggccgtaatgtcctacaacacctggattttccttggtgtggtcttgggctctgctgtgggctactacctagcttacccacttctcagcacagcttagatggtgaggaacgtgcaggcactgaggctggagggacatggagccccctcttccagacactatacttccaactgccctttcttctgatggctattcctccaccttattcccagcccctggaaactttgagctgaagccagcacttgctccctggagttcggaagccattgcagcaaccttccttctcagccagcctacgtagggcccaggcatggtcttgtgtcttaagacagctgctgtgaccaaagggagaatggagataacaggggtggcagggttactgagcccatgacaatgcttctctgtgactcaaaccaggaatttccaaagatttcaagccagggagaagggttcttggtgatgcagggcatggaacctggacaccctcagctctcctgctttgtgccttatctacaggagcatcgcccattggacttcctgacctcttctgtctttgagggacagagaccaagctagatcctttttctcacctttctgcctttggaacacatgaagatcatctcgtctatggatcatgttgacaaactaagttttttttatttttcccattgaactcctagttggcaattttgcacattcatacaaaaaaatttttaatgaaatgatttcattgattcatgatggatggcagaaactgctgagacctatttccctttcttggggagagaataagtgacagctgattaaaggcagagacacaggactgctttcaggctcctggtttattctctgattgactgagctccttccaccagaaggcactgcctgcaggaagaagatgatctgatggccgtgggtgtctgggaagctcttcgtggcctcaatgccctcctttatcctcatctttcttctatgcagaacaaaaagctgcatctaataatgttcaatacttaatattctctatttattacttactgcttactcgtaatgatctagtggggaaacatgattcattcacttaaaatactgattaagccatgggcaggtactgactgaagatgcaatccaaccaaagccattacattttttgagttagatgggactctctggatagttgaacctcttcactttataaaaaaggaaagagagaaaatcactgctgtatactaaatacctcacagattagatgaaaagatggttgtaagctttgggaattaaaaacaaatacattttagtaaatat

SEQ ID NO: 76 - DNA, 60 bp, Homo sapiens
ggaaagagagaaaatcactgctgtatactaaatacctcacagattagatgaaaagatggt

SEQ ID NO: 77 - DNA, 6126 bp, Homo sapiens
tagcaacctatatttctctctggaactttaccacccttccgctgcctctctaaactatagtagcagaaccactgttaggcttgcaatttacatagtcttaaattaaccaagactcaaaaacaaacaaaaaaaacaattccaagcatttagaggtgaaaaggtctttaggattatcctgtccagttgcatcacgttaccaatgagagtacagaagcctaaagaggaggatggcattccctgtggatatgctggaaaattgcagccatgaggaattggaaaattctgctgaagattacatgtcagatttaaggtgtggggaccctgaaaatccagagtgtttttctcttctcaatattacgattcctattagcctgtcaaatgtaggctttgtacctctttatggtggagatcagacccagaaaattcttgctctctttgcacctgaagattcactgacagctgtggcactttaccttgctgatcagtggtgggctattgatgatattgtgaaaacatctgttccttcaagagaggggcttaagcaggtgagcactcttggggagagagtggttctgtatgttctgaatcgaattatttatagaaaacaggaaatggagagaaatgagatcccattcctgtgtcatagcagtactgattatgctaagattctgtggaagaaaggagaggccattgggttttattcagttaagcctacaggaagcatatgtgcctcttttcttacccaaagttaccaattgccagttcttgatacaatgtttctaagaaagaaatacagaggtaaagattttgggcttcacatgctggaggactttgttgattcctttacagaagatgcgcttggcttgcggtatccactgtcttctctcatgtatacagcttgcaagcaatactttgagaagtatccaggagaccatgaactcctttgggaagttgaaggtgttggacactggtaccagcgaataccagtcaccagagcattacaaagagaagcacttaaaattctagcactttctcaaaatgaacctaaaagacctatgtctggagaatatggtcctgcatctgttccagaatacgaagcaagaactgaagacaatcagtctagtgagatgcagctaactattgattctctaaaagatgcctttgcaagcacttccgaaggtcatgataaaacatctgtttccactcatactcgaagtggtaatctaaagcggccaaagattggaaagcggtttcaggattctgaatttagcagttctcaaggtgaagatgaaaagacctcccagacttcacttacagcttcaataaacaaattggagtctactgcacgcccatcagagagctcagaagaattcctggaagaagaacctgaacagagagggattgaatttgaggatgaaagcagtgatagagatgcacggccagcactggaaacccagccacagcaagagaagcaagatggtgaaaaggaatctgaattagagcctatgaatggtgagataatggacgattctcttaagacctcacttataacagaagaggaagactccactagtgaagttttagatgaagaattaaaattgcagccttttaattccagtgaagactctacaaatcttgttccactggtggtagaatcttcaaaaccccctgaggtagatgcaccagataagaccccacgtatacctgactcagaaatgttgatggatgaaggcacatctgatgaaaaggggcacatggaagagaaattgtccctacttccaagaaagaaagcacatcttgggagttcagacaatgttgctactatgtcaaatgaagaacgatctgatggtggttttccaaactctgtgatagctgaattttccgaagaaccggtctctgagaatttgtctcctaatactacttcctcattggaagaccagggtgaggagggggtatctgagccccaggaaacatctactgctcttcctcagagttctttgatagaggttgaacttgaagacgtgccattttcacagaatgcaggacagaagaatcagtcagaggagcagtctgaagcatcttccgagcaactggatcagtttacacaatcggcagaaaaagctgtggatagcagctcagaggaaatagaagtggaagtgcctgtggtagacaggcggaatttaagaagaaaggccaaagggcataaaggacctgctaagaagaaagctaagctgacctgaaggaagaagaaagtggatgataaatcctcttctttgtaacatagttgttgtttttaaaatatggtaattaataaacagcatggggcacaggacaaaaatttccaaaatttcaatttgaacttacttactatgcagttttttgcttccctttagaacgtagaattcaccattgtttttaattttccaggctatttttggtaaatgcaattttttatttttattaaccatgtttcaattttgggaaaccagatcatattatattttctttatcaggtggtacatctgaccattatttcaaaaatataattaaaaagctgtgaaagtagtaggatttccattacttataaggatcacagaaatcttttatactaagggttttaatagtaaaacttggtgagggttctagaagttttaaatttcaaaactaatcaccaattttttaaaatgtaggcatgcctaaacaaaaataagtgtcaataaattagaaaaaatataacttcaagtaaatgagagcacaaaaacagaaacttacggtcaaaggttcatgaagatattttggttttggcctcttaatcctagatatagatgcagttttttcctttgacttcactatctatggaaaggtacacataaaatctgtttctgattcattctatcatctgatgttaacagtactgtcagggatttaactgtggcatgtggggactaattatttaaaatttcatttgaagtattagtttgctgtaattttttttgtctgcatatgtgcagacgcctagaagtttagactttcacctttaatcaggtaaaaatcacaactatactttggagacatggtttaatttggacttctggtcctgatcagatagataaattaagctggagattttacttttatcccaacccagttaacatctatatttcagaagtatgaggctccttcctaaggcatctccttaaatcttgccacctccctaattctacagtcttatttatattcccccacagctttcatctacttctgtaactcatggagtgattctccaatcaacagatcttcctgcctgccggcttatgcccttgatgtccatttttgggtaggtttggaggtgcaccccacaatgttagacctatatggcaggagtaaaactgcccccagtgttagacctatatggcaggggtaaactgcctttgggggagctgtggttacaagggcttcaatcatattggaggcttcaatcatcctttgatttgtactgagtactggttgcaagctggcctgttaagtatatattgtgttgccataacaaaggcctaggaaaatttgaagaaaaaaaacactgaactgttattttttgtaatttatttaaaaatggacaaaatggttattagaatccaaagataatctaaaaacagttctactctttggaaatattatgtgtactcaaatttgcacttaagttggagaatgttttgagaccatttaaattgttttaaaaatagcttgatcttgatccttatgcaaaagaaactaagactttgtgtcattatttgaggtagctaaggactgatgttgaaagtgtattcagtctatagtaagctgatgtcaggtcagtaaattttgtttggggatgttggtattttcgatcaagttaaaatcttaaagcagacaaaaatagtaaacgctcctatttgtgttagattttgaacaattgtattaccctatattttctttaattagtcaaaggtaagccagattatttcattctaaatgaaaattaaagcactttggccatttattttttcaacaaatgctaatactaagtaaaaaaaaaaaagtatgactactattagtgaatctaccaaacatttatgctgttttatacattttatgagaaacttctgtcaatatcacaaagggaaatactctgttaagattcagtaaattcttaatctttacatgtttcatttcttagatttgaaaacacttgtagatattttatttttacttggatttgtttaaaatactttcttttcaaattattttaaacatggaaacgcttcatgaatttgtgtcatccttgcacaggggccatgctaattttccctgtattgttctaattttagtatatgtgctgccgaagtgagcactaaaagactttctttagacaagtgtagttttttaaagattgagctcactggctcaactcttgatgtgtgaatatagttgagtttacaaaaaatgtttattaatcatatatgaccattgggggctaacagtataaacttattcttgttaaacttgtttgggttaaatagtaagtgaattgtaaacaatttagaagttttttgttcagcacacaagaacacttctgttacagattctctctgacagaaattgttattttggggtttatagattatagagggaaaagttagatcacttggaaaaacctaactctcatgttcagtaacttgagtatagaatttataccacaatttatcttcaataaggaacctacatgaacttaatcagttatctgtagtttttgcaaggcattagaaaaaatttcacaattacagaggactgaaaatgtgatttcaaccggctagtctagttgttgaatgtccagtcacattacacatagtcctttgtgaacttatttgtgaagggagttcactttttatgtacatacgtgtatatttccttgtgtaatataaagcagatggttattagtattttagttctttcaagtttaaattattcaattgctagacatcacagaaattagtatatttaagaatttattataaagctcctctacaacttttaaaggtgagagggtctattatgatttttttataaaatcaaacagcatgatttagaacgtcagtcttctacttaaaatgtgtctatattcatggtatttccattcagtgtagatggtaaggaaaacatctagtcattaaagatttacttatagcagactccagaacactacctacaatggggtttcagtgactagaaatcttgaaggtttatgattgcatcaaattgagcctgtactaatatctaaatatctgctcttatgttctgctttatcccttgggattaccttctaaggtttggtcacaccagcaaactgaaacagatcttaatgtacataaaaaatttatactaatattactcatctgtgttacagtattttgaaaaatgtttcaggtgtcatctagtcgtctttcatgggtgtgattagttacaaatgttatgcttatgttttcatacttaatatcaagctttctttgtaccttacaagatagtatttttggttctaaaaaaaacaagcaaacttcatttttgtagtatccagaaattacctggagtcagtatttttattcgccttctagaacttgtgatccacacatcacccatttatattagtggtaaaattatctgctaaaatctaattgtaagaaaggcttaccttctgtcatcaagtgattgtatcatcctggatcgtcatttccaaggaactagcctttcttttcctaagcgtctgtatgtgttctaaaacttccagtatatatttatagaacttagaaaaaatgttacattattcagagtagcaagtcttactggagtacctatgtttgttttcttggtttttatttttttttaagtttaaaagtagtaattaaacctatattttgtgattgtttcctggtctgtgtttttaaattcctttccttcagttttcctcatgaagatgtttcagatactgaatttgtttagacattgaatgactttgttaaaggcacaattaatcacattggttgtactctgaagacagacttctttaaaaaaaaaataaacaatttaaaacaa

SEQ ID NO: 78 - DNA, 60 bp, Homo sapiens
agacattgaatgactttgttaaaggcacaattaatcacattggttgtactctgaagacag

SEQ ID NO: 79 - DNA, 1024 bp, Homo sapiens
cttcctggctcctccttcctccccacccctctaataggctcataagtgggctcaggcctctctgcggggctcactctgcgcttcaccatggctttcattgccaagtccttctatgacctcagtgccatcagcctggatggggagaaggtagatttcaatacgttccggggcagggccgtgctgattgagaatgtggcttcgctctgaggcacaaccacccgggacttcacccagctcaacgagctgcaatgccgctttcccaggcgcctggtggtccttggcttcccttgcaaccaatttggacatcaggagaactgtcagaatgaggagatcctgaacagtctcaagtatgtccgtcctgggggtggataccagcccaccttcacccttgtccaaaaatgtgaggtgaatgggcagaacgagcatcctgtcttcgcctacctgaaggacaagctcccctacccttatgatgacccattttccctcatgaccgatcccaagctcatcatttggagccctgtgcgccgctcagatgtggcctggaactttgagaagttcctcatagggccggagggagagcccttccgacgctacagccgcaccttcccaaccatcaacattgagcctgacatcaagcgcctccttaaagttgccatatagatgtgaactgctcaacacacagatctcctactccatccagtcctgaggagccttaggatgcagcatgccttcaggagacactgctggacctcagcattcccttgatatcagtccccttcactgcagagccttgcctttcccctctgcctgtttccttttcctctcccaaccctctggttggtgattcaacttgggctccaagacttgggtaagctctgggccttcacagaatgatggcaccttcctaaaccctcatgggtggtgtctgagaggcgtgaagggcctggagccactctgctagaagagaccaataaagggcaggtgtggaaacggcaaaaaaaaaaaaaaaaaaaaaaaaaaaaaa

SEQ ID NO: 80 - DNA, 60 bp, Homo sapiens
ccttaaagttgccatatagatgtgaactgctcaacacacagatctcctactccatccagt

SEQ ID NO: 81 - DNA, 60 bp, Homo sapiens
tgtttttcaatctcatctgatatgcagagtatttctgccccacccacctaccccccaaaa

SEQ ID NO: 82 - DNA, 2116 bp, Homo sapiens
atcagaaccaaattgctgagccagtcacctgtgttccaggagccgaatcagaaatgtcatcctcaggcacgccagacttacctgtcctactcaccgatttgaagattcaatatactaagatcttcataaacaatgaatggcatgattcagtgagtggcaagaaatttcctgtctttaatcctgcaactgaggaggagctctgccaggtagaagaaggagataaggaggatgttgacaaggcagtgaaggccgcaagacaggcttttcagattggatccccgtggcgtactatggatgcttccgagagggggcgactattatacaagttggctgatttaatcgaaagagatcgtctgctgctggcgacaatggagtcaatgaatggtggaaaactctattccaatgcatatctgaatgatttagcaggctgcatcaaaacattgcgctactgtgcaggttgggctgacaagatccagggccgtacaataccaattgatggaaatttttttacatatacaagacatgaacctattggtgtatgtggccaaatcattccttggaatttcccgttggttatgctcatttggaagatagggcctgcactgagctgtggaaacacagtggttgtcaaaccagcagagcaaactcctctcactgctctccacgtggcatctttaataaaagaggcagggtttcctcctggagtagtgaatattgttcctggttatgggcctacagcaggggcagccatttcttctcacatggatatagacaaagtagccttcacaggatcaacagaggttggcaagttgatcaaagaagctgccgggaaaagcaatctgaagagggtgaccctggagcttggaggaaagagcccttgcattgtgttagctgatgccgacttggacaatgctgttgaatttgcacaccatggggtattctaccaccagggccagtgttgtatagccgcatccaggatttttgtggaagaatcaatttatgatgagtttgttcgaaggagtgttgagcgggctaagaagtatatccttggaaatcctctgaccccaggagtcactcaaggccctcagattgacaaggaacaatatgataaaatacttgacctcattgagagtgggaagaaagaaggggccaaactggaatgtggaggaggcccgtgggggaataaaggctactttgtccagcccacagtgttctctaatgttacagatgagatgcgcattgccaaagaggagatttttggaccagtgcagcaaatcatgaagtttaaatctttagatgacgtgatcaaaagagcaaacaatactttctatggcttatcagcaggagtgtttaccaaagacattgataaagccataacaatctcctctgctctgcaggcaggaacagtgtgggtgaattgctatggcgtggtaagtgcccagtgcccctttggtggattcaagatgtctggaaatggaagagaactgggagagtacggtttccatgaatatacagaggtcaaaacagtcacagtgaaaatctctcagaagaactcataaagaaaatacaagagtggagagaagctcttcaatagctaagcatctccttacagtcactaatatagtagattttaaagacaaaatttttcttttcttgatttttttaaacataagctaaatcatattagtattaatactacccatagaaaacttgacatgtagcttcttctgaaagaattatttgccttctgaaatgtgacccccaagtcctatcctaaataaaaaaagacaaattcggatgtatgatctctctagctttgtcatagttatgtgattttcctttgtagctacttttgcaggataataattttatagaaaaggaacagttgcatttagcttctttcccttagtgactcttgaagtacttaacatacacgttaactgcagagtaaattgctctgttcccagtagttataaagtccttggactgttttgaaaagtttcctaggatgtcatgtctgcttgtcaaaagaaataatccctgtaatatttagctgtaaactgaatataaagcttaataaaaacaaccttgcatgaaaaaaaaaaaaaaaaaaaaa

SEQ ID NO: 83 - DNA, 60 bp, Homo sapiens
catccaggatttttgtggaagaatcaatttatgatgagtttgttcgaaggagtgttgagc

SEQ ID NO: 84 - DNA, 1907 bp, Homo sapiens
ccgcggacgcgtggggctgaggtggctgtcgccggctccgagctgcggccgagcccccgatggaggccgaggccgcggacgctcccccgggcggggttgagtcggcgctcagctgcttctctttcaaccaggactgcacatccctagcaattggaactaaagccgggtataagctgttttctctgagttctgtggagcagctggatcaagtccacggaagcaatgaaatcccggacgtctacatcgtggagcgcctcttctccagcagcctggtggtggtagtcagtcacacaaaaccacggcagatgaacgtgtatcacttcaagaaaggcacagagatctgtaattacagctactccagcaacatcttgtccataaggctgaaccggcaaaggctgctggtttgcctagaagagtccatttatattcacaacattaaagacatgaagctgttgaagaccctcctggatattcctgcaaacccaacaggtctatgtgctctctctatcaaccattccaattcttacctggcctatcctggaagcctgacttcaggggagattgtgctttatgatggaaactccctgaaaacagtctgcactattgctgcccatgagggaacactagctgccatcaccttcaatgcctcaggctccaaactagcaagtgcgtctgaaaaaggcacagtcatccgggtgttctctgtccctgatgggcaaaagctctatgagttccggagagggatgaaaaggtatgtgacaatcagctctctagtgttcagtatggattcacaattcctctgcgcctccagtaacaccgagacggtacacatcttcaagctggaacaggtcaccaacagtcgaccagaagagccttcgacctggagtggctacatgggaaagatgtttatggctgctaccaactacctccctacccaggtgtcagacatgatgcatcaggacagggcttttgccactgcacgcttgaacttctccggacagaggaacatctgtaccctctcaacgatccagaagttgccacggctgctagttgcgtcatccagtggacacctttatatgtacaatttggatcctcaggatggaggagagtgtgtcttaatcaaaacccacagcttgcttggctcaggaacaacagaagagaataaagaaaatgacctcagaccttccttacctcagtcttatgcagcgaccgtagccagaccaagtgcatcttcagcctccacggtgccaggttattctgaggacggcggggcgctgcgaggagaagttattcctgaacatgagtttgcgacgggaccagtgtgtcttgatgatgagaatgagtttcctcctataatcttgtgccgtggaaatcagaagggcaaaacgaagcagtcatgatgagaagcacacctcagaaatcaggacatcccccctatcaggtggttttggagaaaacaaggaaggcggaagaatggagtgcaattgtgtgagcagaaaggggggcaggaatcccgggtgctccactgcttaaaccacaggacctggttaactcctcaccaagcttcccacgaccctggttgccaatgggcgcgggagacattgtatacacatcatgctatttaaaatacgttcaaactatagtgtaaatgctaattaaccatattggtatataaccggaattttatattaaaaggggcctcctttttaaatatatgccgtgtaaaaaatgtacttataggaacatctctttgaattgtatttcttgtatattacatacttagagagagactcttttagccaggcaaagtcttttttggctgtggctggaataaatcatttattacttgggagtcccattttggacactaataataaaatcatggcaatgcaaaaaaaaaaaaaaaa

SEQ ID NO: 85 - DNA, 60 bp, Homo sapiens
gcgcgggagacattgtatacacatcatgctatttaaaatacgttcaaactatagtgtaaa

SEQ ID NO: 86 - DNA, 1444 bp, Homo sapiens
gtttctcttatttatgccttgaggactaatttctggttttctagctgttaatgcactgttgaccttcataatggtgccttacgcaagcgatcccttctgtgggggtctcatacaggggtgtgggcgatgcatgctttattaaggctcttgtttcacctggcagtgtactgtatcaacgtataatacagaaaaaaaatctctttaaggtcctccttcacaaagacatagagtgaaactccctttacatgtcagtatttgttcaacactttaggcaacttgactgtcagtgttaaaatggaaaacaggaaaatggaaaaatctgaccaattctgccaccctgagactttcatatagaccttgcacaacaattgtatagatcacacaccggctgtatttaatatgtaacattttcacacatattaaagatacagaagtattaaaaaacccccaatgttaatgtatttgcttaaaaggcacaagtttcacatatctgtctagctatctgttggtaatacagaaagtatactacttttttaaaaaagtgggcagaattcttgtgtatgtatatttgtgtgtacagtatgtgtatgtgtgtatatatatatattatatatatagataatatataaatattttttttaaggagaaactagaacgtttagctagaaaattccacagcctgtgaagaaatatttcaaaatggccataaaggaggtaaaaatgaaaaaccataacctaacttttatagaggctttatctttaatttaacgatgtgcggaggactttcttgcttgaatctgttccgggctgtctgctctgtccatcaaatgggcaggtctggaatgaggcaccttcggccgttcagaagtggcctgaacagaatgctggaacccaggctggactcggacacactaaggttttgattttgaatttcagccttattagaagatctaacctaagagtaagctaaccacagggattcttttgtagaacactttttatgcagatgaagctattttttccagcaagtagattcttccagtttttccaaggagtaatttccccgaattggcataccacggcgtggacagctgatatttcacccagctgctggcttgtgggtgtggctctttgctttatatatatatacacacatgtgagtctggctgggctggtattttgtttgatcttcctggaaatgagcagtgactaacgctcacataactggtttttttttcttatctgggctgatgaatacatttacctaagaaactcatttcgttttacttaagaggggaagtgcagttttcttttggcagttcagaatccaagcacttgatttgctgggtttggaaaactccttttttggccttctatgtgcttagccataacaattccattaagcaagaaggtaagcaaaagacaaaaaaaaaaaaaaaaaaaa

SEQ ID NO: 87 - DNA, 60 bp, Homo sapiens
tcggacacactaaggttttgattttgaatttcagccttattagaagatctaacctaagag

SEQ ID NO: 88 - DNA, 4261 bp, Homo sapiens
actcactgagccccaggcccaaggataatgatgtgttgtttcttggtagcataatttgtcacacgtacattttttcttcttcttctcttgcagaaagctctgctccctctctctctccctctctctttctctcttttctccctctcctacattttcttgctgttgctaattcatggtgatcaaatgatgtacgacaaaataaattgtaaagagtgactgcctggagttgggaaccagaaggtgttttccccctcccaaggagacagcaaacctttaaaaaggaaggacaattgatttttggggggagcttaagtgagccttgactttgcagctggttgagaacaggttggaggagggtttaaagccaggtgcaccgagtcagctcgccatgtccagatccggggacaggacctccaccttcgaccccagccacagcgacaacctgctgcacggcctcaacctgctgtggaggaagcagctgttttgcgacgtgaccctgacggcccagggccagcagttccattgccacaaggccgtgctggcctcctgctcgcagtacttccgatcgctcttctccagccacccccctctcgggggaggggtcggcggccaggacggcctgggggcccccaaggaccagcagcagccgccgcagcagcagccgtcacagcagcagcagccgccgccgcaggaggagcccgggactccttcttcctcccccgacgacaagctgctgaccagcccccgggccatcaacaacctggtgctgcagggctgctcgtccatcgggctgcgcctggtgctcgagtacctctacacggccaacgtgaccctgtccctggacacggtggaggaggtgctgtcggtcagcaagatcctgcacatcccccaggtcaccaagctctgcgtgcagttcctcaacgaccagatctcggtgcagaactacaagcaggtgtgcaagatcgccgcgctgcacggcctggaggagaccaagaagctggccaacaagtacctggtggaggatgtgctgctgctcaacttcgaggagatgcgcgccctgctggactcgctgccgccccccgtggagtcggagctggcgctcttccagatgtccgtgctgtggctggagcacgaccgcgagacccgcatgcagtatgcgcctgacctcatgaagcgcctccgcttcgccctcatcccggccccggagctggtggagcgggtccagtcagtggatttcatgcgaaccgacccggtctgccagaagctgctgctggacgccatgaactaccacctgatgcccttcaggcagcactgcaggcagagcctggccagcagaattcgctctaacaagaaaatgctgttattggttggagggctgcctcctggaccggaccggctccccagcaatttggttcagtattacgacgatgaaaagaagacatggaaaatactcacaattatgccatacaacagtgcccaccactgcgttgtggaggtggaaaacttcttgttcgtgttgggtggagaggaccagtggaatccgaatggaaaacacagtacaaattttgtcagccgatatgatcctcgatttaatagctggattcaacttccacccatgcaggaaagaagagccagtttctatgcatgtcggttggacaagcatttatacgtaattggtggaaggaatgaaactggctacttgtccagcgtggagtgctataacctagaaacgaatgaatggcgctatgtgtcctctttgccacagcctctggcggctcatgcgggagcagtgcacaatgggaaaatatacatttcagggggtgtacacaatggagaatatgtcccatggctatattgctatgacccagtaatggatgtctgggctcgaaaacaagatatgaacacaaaacgtgcaattcacactttggctgtaatgaatgatcgcttgtatgcaattggaggaaatcatttgaaaggtttctcccaccttgatgtaatgcttgtggaatgctatgacccaaaaggtgaccagtggaatatactccaaactcccattttggagggtcgaagtggccctggctgtgcagtgcttgatgacagcatttaccttgtgggaggctacagctggagtatgggggcctacaagtcatctacaatatgctattgtccagagaaaggaacctggacagaactcgaaggagatgtagcagaaccgttggcaggccctgcctgtgtgacagttattctgccctcttgtgtaccatacaacaaataacaccaggaaactctggaatgaacagtatcacattctaggaagcaatggcaggtgacatcactattataataggaacaatgcattctaatggtacaactgccaaaacccacccttggtttctgatgatttataagtaactacaaaagaaagagacctgttcttgaacagatactatgtctataactcagatcgcaccaaacttcctgtggtgacagactcttccatttcagactggttttaacttatcccagctttacaaaaactcttcatgtgaatcttaacttgcaaaaggagaaagataaaatacagaagactggccccagagagacctcagatcagtattgtgcattgtagtctacctgcatgtgatctatgttgacatttcggggatattgtgttcaagaatgattccaaatttgagccaccaaaatacactgcattacagaaattgccacttgattctgtactcttaacctttggctacttcacagactccattggcaacactgttattgaaaatcatgtaagattaaagagaggcattttcgtttctatacaacttcatttcatacaccttctgcccttacagcacctcatgggatcagaaaagagaaagatgttggctcttgtaataaatgctttctaccctataggttctaggctagacagagtcgtcatttctgtgtcctcaattttatctgaaagattaaaacaaaatatattatgtcactattcagttcatggaggtttgtgctttttcatattttgtgatatataagtagtgaacacacatgttatttacttcaaaagacaggattgacaaattcagtcaatactattttagagattctgttagatgatatgtctgacccaaatttaatccataataaaaaaaaatgggagattgttttcaggaattcagggatgaaaagaaagaataatttccattaagtagaattccagttgtctttctgtttctaaaacacagaacttacaagagccacaggagccaattatagcacctgacagaatacttctcctcttcctcaccttcgggtgcctctagacacttgacttacgatcgttattcccccaattcatcatattttgtttgttatcaccagagatgcctgaactcagttaagcgagcaattgctagttgtcttgaggagcatgaggaattcaggagcagaaggtcaggatagcatgagatagtctcaatgtggccaaccaaaaggacaaaactgacaggaatgcacattcgattttcaagccctccagagcttgaacaacaactttaggagtaaataaaagcctaaaatatattttaaccatccagagatggtgttgaatccttcaacaaatgtgtcattcaaaacagtaattagggaaatcccacagatgaaaaatgccttagtgataagctttcatggcagagcacgtcaagataaatgggtatactggaatccgatgccgtttctacagtaaagtgcaatcttcgttgtttttgtatttatttgtatgttcagatccaaaggatccgttgtaaaaatatatatatataaatatatgtatatccagtgcaatcaactgtcatttctttttccttaaaacatatgagtatatagaaagaaaagttacagtactctgtgggaaaatctcagctgacatcatgaatagaatgaggtctgcttcagaaccttttgttgtcaactgtcactgtttcttccaaaagtcacaatttgtacaagaacctttgctttccttagacttgttctgcattttattttttatttctcaccaaaataaaagcatttatgagaattataagtaaagctttctgtatttcagagagacataagttactagaaagtgaaaagtgaataaataagtcacagagaatgtaaattttgtacagtattagaatgtgtaaatgaagcttgcttggaaggggaaaactttaaataaaaactttatgtactaatt

SEQ ID NO: 89 - DNA, 60 bp, Homo sapiens
tcagaaccttttgttgtcaactgtcactgtttcttccaaaagtcacaatttgtacaagaa

SEQ ID NO: 90 - DNA, 4090 bp, Homo sapiens
gggcgctcccggagtatcagcaaaagggttcgccccgcccacagtgcccggctccccccgggtatcaaaagaaggatcggctccgcccccgggctccccgggggagttgatagaagggtccttcccaccctttgccgtccccactcctgtgcctacgacccaggagcgtgtcagccaaagcatggagaatcaagagaaggcgagtatcgcgggccacatgttcgacgtagtcgtgatcggaggtggcatttcaggactatctgctgccaaactcttgactgaatatggcgttagtgttttggttttagaagctcgggacagggttggaggaagaacatatactataaggaatgagcatgttgattacgtagatgttggtggagcttatgtgggaccaacccaaaacagaatcttacgcttgtctaaggagctgggcatagagacttacaaagtgaatgtcagtgagcgtctcgttcaatatgtcaaggggaaaacatatccatttcggggcgcctttccaccagtatggaatcccattgcatatttggattacaataatctgtggaggacaatagataacatggggaaggagattccaactgatgcaccctgggaggctcaacatgctgacaaatgggacaaaatgaccatgaaagagctcattgacaaaatctgctggacaaagactgctaggcggtttgcttatctttttgtgaatatcaatgtgacctctgagcctcacgaagtgtctgccctgtggttcttgtggtatgtgaagcagtgcgggggcaccactcggatattctctgtcaccaatggtggccaggaacggaagtttgtaggtggatctggtcaagtgagcgaacggataatggacctcctcggagaccaagtgaagctgaaccatcctgtcactcacgttgaccagtcaagtgacaacatcatcatagagacgctgaaccatgaacattatgagtgcaaatacgtaattaatgcgatccctccgaccttgactgccaagattcacttcagaccagagcttccagcagagagaaaccagttaattcagcggcttccaatgggagctgtcattaagtgcatgatgtattacaaggaggccttctggaagaagaaggattactgtggctgcatgatcattgaagatgaagatgctccaatttcaataaccttggatgacaccaagccagatgggtcactgcctgccatcatgggcttcattcttgcccggaaagctgatcgacttgctaagctacataaggaaataaggaagaagaaaatctgtgagctctatgccaaagtgctgggatcccaagaagctttacatccagtgcattatgaagagaagaactggtgtgaggagcagtactctgggggctgctacacggcctacttccctcctgggatcatgactcaatatggaagggtgattcgtcaacccgtgggcaggattttctttgcgggcacagagactgccacaaagtggagcggctacatggaaggggcagttgaggctggagaacgagcagctagggaggtcttaaatggtctcgggaaggtgaccgagaaagatatctgggtacaagaacctgaatcaaaggacgttccagcggtagaaatcacccacaccttctgggaaaggaacctgccctctgtttctggcctgctgaagatcattggattttccacatcagtaactgccctggggtttgtgctgtacaaatacaagctcctgccacggtcttgaagttctgttcttatgctctctgctcactggttttcaataccaccaagaggaaaatattgacaagtttaaaggctgtgtcattgggccatgtttaagtgtactggatttaactacctttggcttaattccaatcattgttaaagtaaaaacaattcaaagaatcacctaattaatttcagtaagatcaagctccatcttatttgtcagtgtagatcaactcatgttaattgatagaataaagccttgtgatcactttctgaaattcacaaagttaaacgtgatgtgctcatcagaaacaatttctgtgtcctgtttttattcccttcaatgcaaaatacatgatgatttcagaaacaaagcatttgactttctgtctgtggaggtggagtaggtgaaggcccagcctgtaactgtcctttttcttcccttaggcaatggtgaactgtcattacagagcctagaggctcacagcctcctggaggaagcagcctccactttggatcaggaaatagtaaaggaaagcagtgttgggggtagcggcatgcagaccctcagaccagaatggggacatcttgtggtctgctgcctcaggaatctcctgaccacttgtagtccctccgacttctctagacatctagtctcagtgctagcttatttgtatttttcctctttcacttcttatggaggagagtgtttaactgagttagaatgttgaaactgacttgctgtgacttatgtgcagctttccagttgagcagaggaaaatagtggcaggactgtcccccaggaggactccctgcttagctctgtgggagaccaactacgactggcatcttctcttccccctggaaggcagctagacaccaatggatccttgtcagttgtaacattctatttcaacttcaggaaagcagcagttttcttttaatttttcctatgaccataaaattagacatacctctcaacttacatatgtcttcaacatggttacctctgcataaatattagcaaagcatgccaatttctcttaagtactgaaatacatatgataaatttgactgttatttgttgagactatcaaacagaaaagaaattagggctctaatttccttaaagcaagctcacttgctttagttgttaagttttataaaagacatgaaattgagtcattttatatatgaaaactaagttctctatcttaggagtaatgtcggcccacaagggtgcccacctcttgttttccccttttaaaaactcagatttttaaaagccctttccaaaggtttcaactgtaaaatacttctttttacaatgtatcaacatatttttatttaaggggaattaacaattgccagggaaaccagccaacccaagtttattatatcattaaccttatcataaattcaaacctaagttgctggaccctggtgtgaggacataaatcttccaaagttttgcctatcctaagagctgcatttttctactgctctttaccttgcattttagctaatttaggagttttgagaatgtattggatacgctccagtacataaggagttgccgcatattatatcagactgctttgagaaatctcatccctagtctattgcagttgtttctattagcttactgattaactcagtcctgacacaccttttgggaaatgctgatttaaacttcttaactggcaacagttggaacagtaatcagtttgctaacatatttaaagtcttgaatgttgaagaactcatgtgatttacccttttcaactttttggaaaacgatttaatttattctaattagattaaccctattaatctatggattgggtatcaaaatgaatgccagtccagatgtgcctagacacgaaattggagctgaggactctcacgatatgcaagttcatccaacgtgaagataccataagctttttctctgaaccagagaaatgaaagtcagtttaagaggctgatagatcttggccctgttaaggcatccacttcacagttctgaaggctgagtcagccccactccacagttaggccaagaattagattttaaaacttcatctgtctgtcccagttaactgttaaataaggcctcatcctccactgaagagtatggattgaaggattgtgaactatgtttagtgtgattgtgaacttggtgcctaatgttccatgtctgaagtttgccccagtgctacacgttggagtatacctatgtgtgtgctttgccactgaagtaagattttgcctgtatggtactgttttgtttgttaataaagtgcactgccacccccaatgcaaaaaaaaaaaaaaaaaa

SEQ ID NO: 91 - DNA, 60 bp, Homo sapiens
tgatagaataaagccttgtgatcactttctgaaattcacaaagttaaacgtgatgtgctc

SEQ ID NO: 92 - DNA, 1114 bp, Homo sapiens
gtctggcttgggcaggctgcccgggccgtggcaggaagccggaagcagccgcggccccagttcgggagacatggcgggcgttaaagctctcgtggcattatccttcagtggggctattggactgacttttcttatgctgggatgtgccttagaggattatggcgtttactggcccttattcgtcctgattttccacgccatctcccccatcccccatttcattgccaaaagagtcacctatgactcagatgcaaccagtagtgcctgtcgggaactggcatatttcttcactactggaattgttgtttctgcctttggatttcctgttattcttgctcgtgtggctgtgatcaaatggggagcctgcggccttgtgttggcaggcaatgcagtcattttccttacaattcaagggtttttccttatatttggaagaggagatgattttagctgggagcagtggtagcactttattctgattacagtgcattgaatttcttagaactcatactatctgtatacatgtgcacatgcggcattttactatgaaatttaatatgctgggttttttaatacctttatatatcatgttcactttaagaaagacttcataagtaggagatgagttttattctcagcaaatagacctgtcaaatttagattatgttactcaaattatgttacttgtttggctgttcatgtagtcacggtgctctcagaaaatatattaacgcagtcttgtaggcagctgccaccttatgcagtgcatcgaaaccttttgcttggggatgtgcttggagaggcagataacgctgaagcaggcctctcatgacccaggaaggccggggtggatccctctttgtgttgtagtccatgctattaaaagtgtggcccacagaccaagagcctcaacatttcctagagccttattagaaatgcagaatctgaagccccactctggacccaggacattttgatgagatccaaaggagttgtatgcacatgaaagtttgagaagcatcatcatagagaagtaaacatcacacccaacttccttatctttccagtggctaaaccacttaacctctctgggtgttacctgctcatttgttta

SEQ ID NO: 93 - DNA, 60 bp, Homo sapiens
cactttaagaaagacttcataagtaggagatgagttttattctcagcaaatagacctgtc

SEQ ID NO: 94 - DNA, 1290 bp, Homo sapiens
gctaaccaggccagtgacagaaatggattcgaaataccagtgtgtgaagctgaatgatggtcacttcatgcctgtcctgggatttggcacctatgcgcctgcagaggttcctaaaagtaaagctctagaggccgtcaaattggcaatagaagccgggttccaccatattgattctgcacatgtttacaataatgaggagcaggttggactggccatccgaagcaagattgcagatggcagtgtgaagagagaagacatattctacacttcaaagctttggagcaattcccatcgaccagagttggtccgaccagccttggaaaggtcactgaaaaatcttcaattggactatgttgacctctatcttattcattttccagtgtctgtaaagccaggtgaggaagtgatcccaaaagatgaaaatggaaaaatactatttgacacagtggatctctgtgccacatgggaggccatggagaagtgtaaagatgcaggattggccaagtccatcggggtgtccaacttcaaccacaggctgctggagatgatcctcaacaagccagggctcaagtacaagcctgtctgcaaccaggtggaatgtcatccttacttcaaccagagaaaactgctggatttctgcaagtcaaaagacattgttctggttgcctatagtgctctgggatcccatcgagaagaaccatgggtggacccgaactccccggtgctcttggaggacccagtcctttgtgccttggcaaaaaagcacaagcgaaccccagccctgattgccctgcgctaccagctgcagcgtggggttgtggtcctggccaagagctacaatgagcagcgcatcagacagaacgtgcaggtgtttgaattccagttgacttcagaggagatgaaagccatagatggcctaaacagaaatgtgcgatatttgacccttgatatttttgctggcccccctaattatccattttctgatgaatattaacatggagggcattgcatgaggtctgccagaaggccctgcgtgtggatggtgacacagaggatggctctatgctggtgactggacacatcgcctctggttaaatctctcctgcttggcgacttcagtaagctacagctaagcccatcggccggaaaagaaagacaataattttgtttttcattttgaaaaaattaaatgctctctcctaaagaaacttcacctaaaaaaaaaaaaaaaaaaaaaaaaaaaaaaaaaaaaaaaaaaaaaaaaaaaaaaaaaaaaaaaaaaaaaaaaaa

SEQ ID NO: 95 - DNA, 60 bp, Homo sapiens
tgatcccaaaagatgaaaatggaaaaatactatttgacacagtggatctctgtgccacat

SEQ ID NO: 96 - DNA, 3233 bp, Homo sapiens
cctcagatttctcaggagaccagaactgatctgccagccttgctgccttttgttgctctgctctttacattgtctttacagtcaccaggtgtcaagatgctgcaagtacataggactggactgggcaggctgggggtcagcctctccaagggtcttcaccacaaagctgtgttggccgtccggagggaggatgtgaacgcctgggagagaagggccccgctagctcccaagcacatcaaaggcatcaccaatctgggatacaaggtcttgatacagccttcgaatcggcgggccattcatgataaggactatgtcaaagctggtggcattcttcaggaggatatttctgaagcttgtctaattttaggagttaaaagacctccagaggaaaaattaatgtccaggaagacttatgcatttttctcccacacaataaaagctcaggaggccaatatgggcttgttggatgagattctaaaacaggaaattcgccttattgattatgagaaaatggtggatcatagaggagtacgggtagtggcatttggacagtgggctggtgtggcaggaatgatcaacattttacatggaatgggtttaaggctccttgctttgggacatcacacaccttttatgcacattggcatggctcataactacaggaatagcagtcaggctgtgcaagctgtccgtgatgctggctatgaaatatctttgggtttgatgcctaagtcaataggacccttaacatttgtgttcacaggaactggtaatgtttctaagggagcccaagcaatctttaatgagctaccttgtgaatatgtggagccccatgaattaaaagaagtttcccaaactggagacctcagaaaagtgtatgggacggtgttaagtcgtcatcatcatcttgtcaggaaaacagatgctgtgtatgatcctgcagagtatgacaaacatccggagcgctacataagtcgttttaatactgatattgcaccctatacaacttgcttaattaatggaatctactgggaacaaaacactcctcgcctcctaacccgccaagatgctcagagtctcctggctccgggcaagttctcacctgctggtgtggaaggctgccctgcattaccacacaaactcgtggcaatatgtgacatttcagctgacacaggagggtctatagagtttatgactgagtgtacaacaatagagcatcccttttgcatgtatgatgcagaccagcatattattcatgacagtgttgaaggctcggggatcctgatgtgttccattgacaatttgccggcacagctcccaattgaagctacagaatgctttggagacatgctttacccttatgttgaagaaatgatattatcagacgcgacacagcctcttgaaagtcagaatttttctcctgtggtgagagatgcagtgattacatccaacggtacattacctgataaatataaatatatccagacactccgggagagcagggaacgtgctcagtcactttcaatgggcaccaggagaaaggttttggttcttggatctggctacatatctgagcctgtattagaatatttatcaagagatggcaatatagaaataacagtaggatctgacatgaagaatcaaattgaacagttaggcaagaaatataatattaatcctgttagcatggacatttgtaaacaagaagagaagctgggcttcttggtggcaaaacaggatcttgtcatcagcttgttgccttatgtattgcaccctcttgtggccaaggcctgcatcacaaacaaagttaacatggtcactgcaagctacatcacaccagcactaaaagaattggaaaagagtgtggaagatgctggcatcacaatcattggtgaattgggattggaccctggtctggatcacatgttagcaatggaaacaatagataaagccaaggaagtgggagccacgattgaatcatatatttcctactgtggtgggcttccagcccctgaacattcaaacaatccattgagatataaatttagctggagtccagtgggagttttgatgaatgtaatgcagtctgccacctatctgctcgatggaaaggttgtgaatgttgcaggaggcatctcctttcttgatgccgttacgtccatggatttttttccaggattaaatttggaaggctatcctaacagagacagtacgaaatatgctgagatttatggcatttcttctgctcacactttgttgcgggggacactgagatataagggatatatgaaagctttgaatggatttgtaaaattaggtcttataaacagagaagcgcttcctgcctttagacctgaggccaaccctctcacctggaaacaactcctctgtgacctagttgggatttcaccctcctctgagcatgatgtgttgaaggaagctgttcttaagaaactaggaggagacaatacccagttggaggctgctgaatggttgggcttacttggggatgaacaagttcctcaggcagagtccattctggatgccctctccaagcatttggtcatgaagctttcctatggtcctgaagaaaaagatatgattgtgatgagagacagctttggaatcagacatccttctggacatttagaacataaaacgattgatcttgtggcttatggggacatcaatggcttttcagccatggctaaaaccgtggggttacccaccgccatggcagccaaaatgttgcttgatggtgaaattggagccaaaggcctaatggggcccttttcaaaggagatctatggaccaatattggagcgaattaaagcagaaggcattatatatactacacagagtacaattaaaccataattgggaattatattttgtttttttcttcccaggcaatacacctctgaacatgtgtgtgataaatgggtttgctaatgtgctgttttaaagtataaagcataatatgttttggttaacacaatgtactttttgaactataaatctttattttaatatggaaatgtttggaacaggagatgcaagccactaacagagaactttaataattctaccctgtattttataaatacgtatgtgaaagtgatgatcatgctatttgttaatttattgtgccactttttttcttttgttttttttttgttgttgttgttttttgagatggagtctcgctctgtcacccaggctggagtgcagtg

SEQ ID NO: 97 - DNA, 60 bp, Homo sapiens
aggcaatacacctctgaacatgtgtgtgataaatgggtttgctaatgtgctgttttaaag

SEQ ID NO: 98 - DNA, 3614 bp, Homo sapiens
aaggagagaacttttcctgcacaaggaacgcctcgtggggagacccaaggcaggagcggtccggagccggctgcggcgtgtgcggccggccttgggacagcgatcgccgcgggtggcaacagagagccccaagcaaaagtgggagcaggagcttggaggtgagcacaggaagccccacttgaggcttttacgcagcctctagtctctgtttcttctggaataggcaagcgtcctttcaactctaagagaccagcagaggccactgtcccttaagactgccggagtcctcaccacttctccaggattccagaggagactgtggcgatggtgaatgaaggtcccaaccaggaagagagcgatgacacccctgcgccggagtccgcactccaagcggaccccagcgtctcggtccatcccagcgtctcggtccatcccagcgtctccatcaaccccagcgtctctgtccaccccagcagttcggcccaccccagtgccttagcccaacccagtggcttggctcaccccagtagctcgggccctgaggacctcagcgtgatcaaggtgagcaggcgccgttgggccgtggtcctggtgtttagctgctactccatgtgcaactcctttcagtggatccagtacggctccatcaataacatcttcatgcacttctacggtgtcagtgcctttgccattgactggctgtccatgtgctacatgctgacttacatccctctgctcctgccagtggcttggctgctggagaagttcggcctgcgcaccattgctctcactggctcggctctcaactgcctgggggcctgggtgaagctgggcagcctgaagccgcatctctttccggtcaccgtagtgggccagctcatctgctctgtggcccaggttttcatcctgggcatgccctcccgcatcgcttccgtctggttcggggctaatgaggtttcaacagcctgctcggtggctgtctttggcaatcagcttggaattgcgattgggttcttggtccctcctgttttggtacccaacattgaagaccgggacgagcttgcctaccacatcagcatcatgttctatataataggaggtgtggccactctcctcctcatccttgtcatcattgtgttcaaggagaaacctaaatatccccccagcagggcccaatccctgagctatgccttgacctctcctgatgcctcatacttaggttccatcgcccggctcttcaaaaatctcaactttgtgctgcttgtcatcacctatggtctgaatgctggtgctttttatgccttgtccactcttctgaatcgcatggtgatctggcactacccgggggaagaagtgaatgctggaagaattggcctgacgatcgtcattgcaggaatgcttggggctgtgatctcaggaatctggctggataggtccaaaacctacaaagagacaaccctggtagtctatatcatgacactggtgggcatggtggtgtacacgtttaccttgaacctgggacacctgtgggtagtgttcatcactgctggcacaatgggcttctttatgactggctatctcccactgggatttgagtttgctgtggagctcacgtacccagaatcagaaggcatctccttcggcctcctcaacatatctgcacaggtatttgggatcatctttaccatctcccagggccagattattgacaactatggaaccaagcctgggaacatcttcctgtgtgtgttccttactcttggagcagccctcactgcattcattaaggcagatctccggagacagaaagcaaacaaagaaactcttgagaacaaactccaagaggaggaggaggagagcaacaccagcaaagtgcccactgctgtgtcagaggatcatctctgagaggaaggtggtgacaactcagggaacacgaacaccccaccttttccttcagcacagctctcaccgccagcacaaagggcttcgctagagatgtttttggagggaatcagtgggactatttgtggcatggatggcctattcctcctagaacccacgtaagagcttggatgatttagttggagaaaattgcacctatcaccaaatgcaaatttgattcccacctccacccccttttaggttatgggagttggtgttgggacagggtggcagagaatattggagtcaatcctagcttggtctcttgccttccctcttttcctccatccatcgtggacaatgcctgcaaaattttcacaggaagaaagcctattcaggatattaacttgaaatttccagtgtcctaagagcctctcatgaagcccagttctaataagtggcaagctgctctgccggggtcatctcctgggtcatcggactgattgctcaagttctgcaggagaggaagcaccattagaacaactccatcagaacagctccaccgggacttgtgggcctaaattttcctggcctaacgggtctgtctccaaaccctctttcctaagagctgagcaaaccaaccataataaacttgacaaaagactttgttgtggccatgacagagataccgactcaggagggctacctacctaggtgtgatcatgctgggggctaccttctgagtatatttgtgaaagcacatatttgggaactctggtagcttgagttgggaatgggaaggttcttttttacagaagtacttccccagggacttctgtgtgtcacagtcacctctgatgcctttatcttgatgttgcattgggaatctcagccatcagcccaagtgcttgttttattccaaggcagggtaatccccgtcaacttactctaacctttgctgaaaactaatcttgattcattctactctgaaaatccaaaggtgcttctgagagataagagggaaggggtagaaggaaaggtgccccttgaaatgggaattgagcctgttagaattaaaagcttatctcacctctgctggggacagtatttgcaccaccaacccctctcctcacctgctttgagcgataatctttatcagatattctaaacttaaagggattccctttaaaccaactcaagctgatctttcctatctagcctgctgtttggctgtactcatgggctttggtaatatctcctaaaaatgaggttttggtaatttttcctatgcattgggcaactgtgatcgtgaccactgtgctgtcttgctccagccactgccctggcctcagcatatcagggcagcctgtgctggctgcaatactgtggtgcttgggccactgcctgagaggagccaggtttgtgtgtgtctgcatgtgtgtgtgtgtgtgtttgtacagattcaagcaatggatgcaaggaacatgctgtatgtaatagaagaaagaagtccacgttttcggcagaagtagtgagtcagtgtggaagagaggtgagggtgtgctttactttttgataaagagaaagatgtttactcataaacccttcaaaaggtattaacaaatgtttaccaaacctattgctttattttaaaaacataatttgtgttttctatttgtaagatctgacatttcgaggccaataaaaacttctcagaaaaaaaaaaaaaaaaa

SEQ ID NO: 99 - DNA, 60 bp, Homo sapiens
caaggaacatgctgtatgtaatagaagaaagaagtccacgttttcggcagaagtagtgag

SEQ ID NO: 100 - DNA, 5776 bp, Homo sapiens
gctcacccaggaaaaatatgcaatcgtcccattgatatacaggccactacaatggatggagttaacctcagcaccgaggttgtctacaaaaaaggccaggattataggtttgcttgctacgaccggggcagagcctgccggagctaccgtgtacggttcctctgtgggaagcctgtgaggcccaaactcacagtcaccattgacaccaatgtgaacagcaccattctgaacttggaggataatgtacagtcatggaaacctggagataccctggtcattgccagtactgattactccatgtaccaggcagaagagttccaggtgcttccctgcagatcctgcgcccccaaccaggtcaaagtggcagggaaaccaatgtacctgcacatcggggaggagatagacggcgtggacatgcgggcggaggttgggcttctgagccggaacatcatagtgatgggggagatggaggacaaatgctacccctacagaaaccacatctgcaatttctttgacttcgatacctttgggggccacatcaagtttgctctgggatttaaggcagcacacttggagggcacggagctgaagcatatgggacagcagctggtgggtcagtacccgattcacttccacctggccggtgatgtagacgaaaggggaggttatgacccacccacatacatcagggacctctccatccatcatacattctctcgctgcgtcacagtccatggctccaatggcttgttgatcaaggacgttgtgggctataactctttgggccactgcttcttcacggaagatgggccggaggaacgcaacacttttgaccactgtcttggcctccttgtcaagtctggaaccctcctcccctcggaccgtgacagcaagatgtgcaagatgatcacagaggactcctacccagggtacatccccaagcccaggcaagactgcaatgctgtgtccaccttctggatggccaatcccaacaacaacctcatcaactgtgccgctgcaggatctgaggaaactggattttggtttatttttcaccacgtaccaacgggcccctccgtgggaatgtactccccaggttattcagagcacattccactgggaaaattctataacaaccgagcacattccaactaccgggctggcatgatcatagacaacggagtcaaaaccaccgaggcctctgccaaggacaagcggccgttcctctcaatcatctctgccagatacagccctcaccaggacgccgacccgctgaagccccgggagccggccatcatcagacacttcattgcctacaagaaccaggaccacggggcctggctgcgcggcggggatgtgtggctggacagctgccggtttgctgacaatggcattggcctgaccctggccagtggtggaaccttcccgtatgacgacggctccaagcaagagataaagaacagcttgtttgttggcgagagtggcaacgtggggacggaaatgatggacaataggatctggggccctggcggcttggaccatagcggaaggaccctccctataggccagaattttccaattagaggaattcagttatatgatggccccatcaacatccaaaactgcactttccgaaagtttgtggccctggagggccggcacaccagcgccctggccttccgcctgaataatgcctggcagagctgcccccataacaacgtgaccggcattgcctttgaggacgttccgattacttccagagtgttcttcggagagcctgggccctggttcaaccagctggacatggatggggataagacatctgtgttccatgacgtcgacggctccgtgtccgagtaccctggctcctacctcacgaagaatgacaactggctggtccggcacccagactgcatcaatgttcccgactggagaggggccatttgcagtgggtgctatgcacagatgtacattcaagcctacaagaccagtaacctgcgaatgaagatcatcaagaatgacttccccagccaccctctttacctggagggggcgctcaccaggagcacccattaccagcaataccaaccggttgtcaccctgcagaagggctacaccatccactgggaccagacggcccccgccgaactcgccatctggctcatcaacttcaacaagggcgactggatccgagtggggctctgctacccgcgaggcaccacattctccatcctctcggatgttcacaatcgcctgctgaagcaaacgtccaagacgggcgtcttcgtgaggaccttgcagatggacaaagtggagcagagctaccctggcaggagccactactactgggacgaggactcagggctgttgttcctgaagctgaaagctcagaacgagagagagaagtttgctttctgctccatgaaaggctgtgagaggataaagattaaagctctgattccaaagaacgcaggcgtcagtgactgcacagccacagcttaccccaagttcaccgagagggctgtcgtagacgtgccgatgcccaagaagctctttggttctcagctgaaaacaaaggaccatttcttggaggtgaagatggagagttccaagcagcacttcttccacctctggaacgacttcgcttacattgaagtggatgggaagaagtaccccagttcggaggatggcatccaggtggtggtgattgacgggaaccaagggcgcgtggtgagccacacgagcttcaggaactccattctgcaaggcataccatggcagcttttcaactatgtggcgaccatccctgacaattccatagtgcttatggcatcaaagggaagatacgtctccagaggcccatggaccagagtgctggaaaagcttggggcagacaggggtctcaagttgaaagagcaaatggcattcgttggcttcaaaggcagcttccggcccatctgggtgacactggacactgaggatcacaaagccaaaatcttccaagttgtgcccatccctgtggtgaagaagaagaagttgtgaggacagctgccgcccggtgccacctcgtggtagactatgacggtgactcttggcagcagaccagtgggggatggctgggtcccccagcccctgccagcagctgcctgggaaggccgtgtttcagccctgatgggccaagggaaggctatcagagaccctggtgctgccacctgcccctactcaagtgtctacctggagcccctggggcggtgctggccaatgctggaaacattcactttcctgcagcctcttgggtgcttctctcctatctgtgcctcttcagtgggggtttggggaccatatcaggagacctgggttgtgctgacagcaaagatccactctggcaggagccctgacccagctaggaggtagtctggagggctggtcattcacagatccccatggtcttcagcagacaagtgagggtggtaaatgtaggagaaagagccttggccttaaggaaatctttactcctgtaagcaagagccaacctcacaggattaggagctggggtagaactggctatccttggggaagaggcaagccctgcctctggccgtgtccacctttcaggagactttgagtggcaggtttggacttggactagatgactctcaaaggcccttttagttctgagattccagaaatctgctgcatttcacatggtacctggaacccaacagttcatggatatccactgatatccatgatgctgggtgccccagcgcacacgggatggagaggtgagaactaatgcctagcttgaggggtctgcagtccagtagggcaggcagtcaggtccatgtgcactgcaatgccaggtggagaaatcacagagaggtaaaatggaggccagtgccatttcagaggggaggctcaggaaggcttcttgcttacaggaatgaaggctgggggcattttgctggggggagatgaggcagcctctggaatggctcagggattcagccctccctgccgctgcctgctgaagctggtgactacggggtcgccctttgctcacgtctctctggcccactcatgatggagaagtgtggtcagaggggagcaatgggctttgctgcttatgagcacagaggaattcagtccccaggcagccctgcctctgactccaagagggtgaagtccacagaagtgagctcctgccttagggcctcatttgctcttcatccagggaactgagcacagggggcctccaggagaccctagatgtgctcgtactccctcggcctgggatttcagagctggaaatatagaaaatatctagcccaaagccttcattttaacagatggggaaagtgagcccccaagatgggaaagaaccacacagctaagggagggcctggggagccccaccctagcccttgctgccacaccacattgcctcaacaaccggccccagagtgcccaggcactcctgaggtagcttctggaaatggggacaagtcccctcgaaggaaaggaaatgactagagtagaatgacagctagcagatctcttccctcctgctcccagcgcacacaaacccgccctccccttggtgttggcggtccctgtggccttcactttgttcactacctgtcagcccagcctgggtgcacagtagctgcaactccccattggtgctacctggctctcctgtctctgcagctctacaggtgaggcccagcagagggagtagggctcgccatgtttctggtgagccaatttggctgatcttgggtgtctgaacagctattgggtccaccccagtccctttcagctgctgcttaatgccctgctctctccctggcccaccttatagagagcccaaagagctcctgtaagagggagaactctatctgtggtttataatcttgcacgaggcaccagagtctccctgggtcttgtgatgaactacatttatcccctttcctgccccaaccacaaactctttccttcaaagagggcctgcctggctccctccacccaactgcacccatgagactcggtccaagagtccattccccaggtgggagccaactgtcagggaggtctttcccaccaaacatctttcagctgctgggaggtgaccatagggctctgcttttaaagatatggctgcttcaaaggccagagtcacaggaaggacttcttccagggagattagtggtgatggagaggagagttaaaatgacctcatgtccttcttgtccacggttttgttgagttttcactcttctaatgcaagggtctcacactgtgaaccacttaggatgtgatcactttcaggtggccaggaatgttgaatgtctttggctcagttcatttaaaaaagatatctatttgaaagttctcagagttgtacatatgtttcacagtacaggatctgtacataaaagtttctttcctaaaccattcaccaagagccaatatctaggcattttcttggtagcacaaattttcttattgcttagaaaattgtcctccttgttatttctgtttgtaagacttaagtgagttaggtctttaaggaaagcaacgctcctctgaaatgcttgtcttttttctgttgccgaaatagctggtcctttttcgggagttagatgtatagagtgtttgtatgtaaacatttcttgtaggcatcaccatgaacaaagatatattttctatttatttattatatgtgcacttcaagaagtcactgtcagagaaataaagaattgtcttaaatgtc

SEQ ID NO: 101 - DNA, 60 bp, Homo sapiens
catatgtttcacagtacaggatctgtacataaaagtttctttcctaaaccattcaccaag

SEQ ID NO: 102 - DNA, 3781 bp, Homo sapiens
gggccggctcgcgggcgctgccagtctcgggcggcggtgtccggcgcgcgggcggcctgctgggcgggctgaagggttagcggagcacgggcaaggcggagagtgacggagtcggcgagcccccgcggcgacaggttctctacttaaaagacaatgactactgatgaaggtgccaagaacaatgaagaaagccccacagccactgttgctgagcagggagaggatattacctccaaaaaagacaggggagtattaaagattgtcaaaagagtggggaatggtgaggaaacgccgatgattggagacaaagtttatgtccattacaaaggaaaattgtcaaatggaaagaagtttgattccagtcatgatagaaatgaaccatttgtctttagtcttggcaaaggccaagtcatcaaggcatgggacattggggtggctaccatgaagaaaggagagatatgccatttactgtgcaaaccagaatatgcatatggctcggctggcagtctccctaaaattccctcgaatgcaactctcttttttgagattgagctccttgatttcaaaggagaggatttatttgaagatggaggcattatccggagaaccaaacggaaaggagagggatattcaaatccaaacgaaggagcaacagtagaaatccacctggaaggccgctgtggtggaaggatgtttgactgcagagatgtggcattcactgtgggcgaaggagaagaccacgacattccaattggaattgacaaagctctggagaaaatgcagcgggaagaacaatgtattttatatcttggaccaagatatggttttggagaggcagggaagcctaaatttggcattgaacctaatgctgagcttatatatgaagttacacttaagagcttcgaaaaggccaaagaatcctgggagatggataccaaagaaaaattggagcaggctgccattgtcaaagagaagggaaccgtatacttcaagggaggcaaatacatgcaggcggtgattcagtatgggaagatagtgtcctggttagagatggaatatggtttatcagaaaaggaatcgaaagcttctgaatcatttctccttgctgcctttctgaacctggccatgtgctacctgaagcttagagaatacaccaaagctgttgaatgctgtgacaaggcccttggactggacagtgccaatgagaaaggcttgtataggaggggtgaagcccagctgctcatgaacgagtttgagtcagccaagggtgactttgagaaagtgctggaagtaaacccccagaataaggctgcaagactgcagatctccatgtgccagaaaaaggccaaggagcacaacgagcgggaccgcaggatatacgccaacatgttcaagaagtttgcagagcaggatgccaaggaagaggccaataaagcaatgggcaagaagacttcagaaggggtcactaatgaaaaaggaacagacagtcaagcaatggaagaagagaaacctgagggccacgtatgacgccacgccaaggagggaagagtcccagtgaactcggcccctcctcaatgggctttcccccaactcaggacagaacagtgtttaatgtaaagtttgttatagtctatgtgattctggaagcaaatggcaaaaccagtagcttcccaaaaacagcccccctgctgctgcccggagggttcactgaggggtggcacgggaccactccaggtggaacaaacagaaatgactgtggtgtggagggagtgagccagcagcttaagtccagctcatttcagtttctatcaaccttcaagtatccaattcagggtccctggagatcatcctaacaatgtggggctgttaggttttacctttgaactttcatagcactgcagaaaccttttaaaaaaaaatgcttcatgaatttctcctttcctacagttgggtagggtaggggaaggaggataagcttttgttttttaaatgactgaagtgctataaatgtagtctgttgcatttttaaccaacagaacccacagtagaggggtctcatgtctccccagttccacagcagtgtcacagacgtgaaagccagaacctcagaggccacttgcttgctgacttagcctcctcccaaagtccccctcctcagccagcctccttgtgagagtggctttctaccacacacagcctgtccctgggggagtaattctgtcattcctaaaacacccttcagcaatgataatgagcagatgagagtttctggattagcttttcctattttcgatgaagttctgagatactgaaatgtgaaaagagcaatcagaattgtgctttttctcccctcctctattccttttagggaataatattcaatacacagtacttcctcccagcattgctactgctcagcttcttctttcattctaatccttgctattaagaatttaagacttgtgcttacaatatttttgacctggagtggatctatttacatagtcatttaggatccatgcagctttttttgtctttttaagattattggctcataagcatatgtatactggtttatggaactttatttacactcctctatcatgcaaaaaaattttgactttttagtactaagcttaatttttaaaaacaaaatctgtagtgttgacaaataaatagttgctcttctacactaggggtttcacctgcaggtttgacacgcagttgctcgcttttcctgccctgtcaagcttctctgttctggcgtgagttgtgaaagagttgaagacagcttcccatgccggtacacagccagtagcctaaatctccagtacttgagctgaccattgaactagggcaagtcttaaatgtgtacatgtagttgaatttcagtccttacgggtaaacagattgagcatggctctctattccctcagcctaagaaacactcatgggaatgcatttggcaacccaaggaaccatttgcttaaacctggaacatctcacctttttaaatcctaaaaaacactggcagttatattttaaattagtttttatttttatgatggttttatcaaaagacttttattattagattgggacccccttcaaacctaaaaatcaagttatttccttttataatacttttcttccccatggaacaaatgggatcaatttgtgagttttttcctttaatgataactaaaatccctctaatttctcatttatgcttttgtcttttttatgaaatatttcttttaaaagccccagtctcacctacgaaatatgaagagcaaaagctgattttgcttacttgctaaactgttgggaaagctctgtagagcatggttccagtgaggccaagattgaaatttgatactaaaaaggccacctagctttttgcagataacaaacaagaaagctattccaagactcagatgatgccagctgtctcccacgtgtgtattatggttcaccagggggaactggcaaaagtgtgtgtggggaggggaagggtgtgtgagtggttctgagcaaataactacagggtgcccattaccactcaagaagacacttcacgtattcttgtatcaaattcaataatcttaaacaatttgtgtagaagtccacagacatctttcaaccaccttttaggctgcatatggattgccaagtcagcatatgaggaattaaagacattgtttttaaaaaaaaaaaatcatttagatgcacttttttgtgtgttctttaaataaatccaaaaaaaatgtgaaaaaaaaaa

SEQ ID NO: 103 - DNA, 60 bp, Homo sapiens
cccaactcaggacagaacagtgtttaatgtaaagtttgttatagtctatgtgattctgga

SEQ ID NO: 104 - DNA, 60 bp, Homo sapiens
aggatgagtatggacagtttctcgtgaactgtaacagcattcagaatctgcccagcttga

SEQ ID NO: 105 - DNA, 3367 bp, Homo sapiens
gaggccgagctcggctgggcttggcgaggctgcagcgcggccaccggcgggagtgcagcggccactgtacccagagattcaaaaccccaaacccgggacttgggggcgctgagccgggccgggaagcagagcctggtcgtgaggaacagccgcccgttgctgtctgcccctttgcggacagcgtctccctcgactccgcttaggaagtggtgggggcggcgtggcccccgtcgggaggcgttcgaacgcccgctaggagagagaaaggattcccctgtgcttggagcccgcactcgggcgcggagggagcggcggcaggctctcgctttcggcaccatgggctgcacgctgagcgccgaggacaaggcggcggtggagcggagtaagatgatcgaccgcaacctccgtgaggacggcgagaaggcggcgcgcgaggtcaagctgctgctgctcggtgctggtgaatctggtaaaagtacaattgtgaagcagatgaaaattatccatgaagctggttattcagaagaggagtgtaaacaatacaaagcagtggtctacagtaacaccatccagtcaattattgctatcattagggctatggggaggttgaagatagactttggtgactcagcccgggcggatgatgcacgccaactctttgtgctagctggagctgctgaagaaggctttatgactgcagaacttgctggagttataaagagattgtggaaagatagtggtgtacaagcctgtttcaacagatcccgagagtaccagcttaatgattctgcagcatactatttgaatgacttggacagaatagctcaaccaaattacatcccgactcaacaagatgttctcagaactagagtgaaaactacaggaattgttgaaacccattttactttcaaagatcttcattttaaaatgtttgatgtgggaggtcagagatctgagcggaagaagtggattcattgcttcgaaggagtggcggcgatcatcttctgtgtagcactgagtgactacgacctggttctagctgaagatgaagaaatgaaccgaatgcatgaaagcatgaaattgtttgacagcatatgtaacaacaagtggtttacagatacatccattatactttttctaaacaagaaggatctttttgaagaaaaaatcaaaaagagccctctcactatatgctatcaagaatatgcaggatcaaacacatatgaagaggcagctgcatatattcaatgtcagtttgaagacctcaataaaagaaaggacacaaaggaaatatacacccacttcacatgtgccacagatactaagaatgtgcagtttgtttttgatgctgtaacagatgtcatcataaaaaataatctaaaagattgtggtctcttttaagttttgcagttcatggtaaaatgcattttcaaaccaaatgagtacttatatatggatctctgtagactagagtcttgcagcaacacagaatgtaatataaggcaaatgcatctgggacttgaccaaagttgttctgttttgtttttttaactgaaagtaacagaaggacctttcttaaatgtgacagatggtcctgcagtgtgaaactgaaggacagtgttaaagctgggctctagtatattgatgatttctgcataagtgtaaatatgcaaatgtatgtatacatgtatttatgactttagttttcgacattatttttaggttttaagagtggcaacttaggattttagggtgatggctttggaaataacataaatataccttgtactgaatgacagactattactacgtttgccagttttaaacagctttatttatgttcatgtcctgtaaatttttaagtacagtaattaatattaggaaacattacagcccttatctagattatatgtatacttgtattaataaaaatgttatttgtacaaacattgcacagactattttaataacatgatttgttctttaaattttatgtgttttattgaaatgttcttaagatgaatacacctgcctttggatcaactatttaaacattgtatgcattttgatttttcctactttaagaaaataaaataatttaattttacattagattccacgttagatttggtttgaaaaactaaaatttcagatttctgaggatatactgtcttagacttattgtacacacttagtttttattcacttgttttcactctgaattttaatatttggctgatatgaatgcattgcctcaaaggtgatgtcatcttaatttttattcactttaaataactacatttttgtttataactaagtttggagggatcctaagagcatttttgtgggtaaaaaaaaaacctgtggacataatgaattttgagacattgattggtgaggcttttatttcccttgaggagtctcttgtacctagcatacatgatagctccttgttgggaagataacaagaaggatctttgaatactctattgctgatataatgcaagatttaaatttatacatataactaatttcaaatgtaattatcacactatgttaaaattacttttttcccttagataattcaaatttctccacttgcttgagattatatcatttctttttcaattatactattatttctgagaatgaaatggacgattacacttagaaaatgagtaatagtgtttaataagtcagtgattatatgtgtgctcaaataagtgttatgtatcagctagatactgagctttgatagaataattttcttttgattattcatgatgtgtcatctctgaccttgtttcagcaaagtaaacagcactccccaccccaccctcatttttttactcatcttggaaaaggttagtctttcagtacacgttactggtaagtagtttccaagttacgtgttgtcactgggttgaagtatatttgtgtgtgtgtgtgtgtgtgtgtgtgtgtgtgtgtgtgtgtaaccataaactatattcatatctgtttcatttggaggattttcttctttgtaatgtaaagaaattcaaagttatcaaagttccttaaatgtgttagtttagattctttatgtgcctttcatgaaagatatgttttcattaattttactggtggacctgtaatatccacattgtgaagctgtgtatgaaattcaactataatatgaataaatttgaatcatgagaattatgggttaaaaagccacaaagaagcacatattggtgaccatcattaatgaaatcctgaactttattctgtgtaattgtgttaataaatcctaataaatttaaatttttaaaattttacaaacaaaaaaaaaaaaaaaaaaaaaaaagaaaaaaaaaaaaaaaaa

SEQ ID NO: 106 - DNA, 60 bp, Homo sapiens
ggtgatggctttggaaataacataaatataccttgtactgaatgacagactattactacg

SEQ ID NO: 107 - DNA, 1427 bp, Homo sapiens
ctgggaatatgattatgcttaatctatgctcagtcgaaaggggctggggctgctttctcccctcccttcttgactctctgttcacagaactcaggctgcctccagccagcctttgcccgctagactcactggccctgagcacttgaaggtgcagcaagtcactgagaatgagcactttcttctcggacacagcatggatctgcctggctgtccccacagtactatgtgggacagtattttgcaaatacaagaagagctcagggcagctgtggagctggatggtctgcctggcaggcctctgtgcagtctgcctgctcatcctgtcccctttttggggcttgatcctcttctcggtgtcatgcttcctcatgtatacttacttatctggccaagaattgttacctgtggatcagaaggcagtcctggtgacaggtggtgattgcgggcttggccatgctttgtgcaagtatctggatgagctgggcttcacggtatttgccggagttttgaatgaaaatggcccaggagctgaggaattgcgaagaacctgctctccgcgcctctcggtgctccaaatggacatcacgaagccagtgcagataaaagatgcttacagcaaggttgcagcaatgctgcaggacagaggactgtgggctgtgatcaacaatgctggggtgcttggctttccaactgatggggagcttcttcttatgactgactacaaacaatgcatggccgtgaacttctttggaactgtggaggtcacaaagacgtttttgcctcttcttagaaaatccaaagggaggctggtgaatgtcagcagcatgggaggaggggccccaatggaaaggctggcatcttatggctcatcaaaggcggctgtgaccatgttctcatcagttatgagactggagctttccaagtggggaattaaagttgcttccatccaacctggaggcttcctaacaaatatcgcaggcaccagtgacaagtgggaaaagctggagaaggacattctggaccacctccccgctgaggtacaggaagactacggccaggactacatcttagcacagcggaatttcctcctattgatcaactcgttagccagcaaggacttctctccggtgctgcgggacatccagcatgctatcttggcgaagagcccttttgcctattacacgccagggaaaggcgcttacttgtggatctgccttgctcactatttgcctattggcatatatgattactttgctaaaagacattttggccaagacaagcccatgcccagagctctaagaatgcctaactacaagaaaaaggccacctaggcaatggaagccctcaaagaagtcggaatgtcatagtcttgaaatgaaagggaaactgggaaactgggtttctcattaaagttgtttcccactctg

SEQ ID NO: 108 - DNA, 60 bp, Homo sapiens
gctcactatttgcctattggcatatatgattactttgctaaaagacattttggccaagac

SEQ ID NO: 109 - DNA, 799 bp, Homo sapiens
tcgcctcgcacccccagccagtccgtcgatccagctgccagcgcagccgccagcgccggcacatcccgctctgggctttaaacgtgacccctcgcctcgactcgccctgccctgtgaaaatgttggtgcttcttgctttcatcatcgccttccacatcacctctgcagccttgctgttcattgccaccgtcgacaatgcctggtgggtaggagatgagttttttgcagatgtctggagaatatgtaccaacaacacgaattgcacagtcatcaatgacagctttcaagagtactccacgctgcaggcggtccaggccaccatgatcctctccaccattctctgctgcatcgccttcttcatcttcgtgctccagctcttccgcctgaagcagggagagaggtttgtcctaacctccatcatccagctaatgtcatgtctgtgtgtcatgattgcggcctccatttatacagacaggcgtgaagacattcacgacaaaaacgcgaaattctatcccgtgaccagagaaggcagctacggctactcctacatcctggcgtgggtggccttcgcctgcaccttcatcagcggcatgatgtacctgatactgaggaagcgcaaatagagttccggagctgggttgcttctgctgcagtacagaatccacattcagataaccattttgtatataatcattattttttgaggtttttctagcaaacgtattgtttcctttaaaagccaaaaaaaaaaaaaaaaaaaaaaaaaaaaaaaaaaaagaaaaaaaaaaaaaaaaaaaaa

SEQ ID NO: 110 - DNA, 60 bp, Homo sapiens
atatgtaccaacaacacgaattgcacagtcatcaatgacagctttcaagagtactccacg

SEQ ID NO: 111 - DNA, 6317 bp, Homo sapiens
tagtaagacaggtgccttcagttcactctcagtaaggggctggttgcctgcatgagtgtgtgctctgtgtcactgtggattggagttgaaaaagcttgactggcgtcattcaggagctggatggcgtgggacatgtgcaaccaggactctgagtctgtatggagtgacatcgagtgtgctgctctggttggtgaagaccagcctctttgcccagatcttcctgaacttgatctttctgaactagatgtgaacgacttggatacagacagctttctgggtggactcaagtggtgcagtgaccaatcagaaataatatccaatcagtacaacaatgagccttcaaacatatttgagaagatagatgaagagaatgaggcaaacttgctagcagtcctcacagagacactagacagtctccctgtggatgaagacggattgccctcatttgatgcgctgacagatggagacgtgaccactgacaatgaggctagtccttcctccatgcctgacggcacccctccaccccaggaggcagaagagccgtctctacttaagaagctcttactggcaccagccaacactcagctaagttataatgaatgcagtggtctcagtacccagaaccatgcaaatcacaatcacaggatcagaacaaaccctgcaattgttaagactgagaattcatggagcaataaagcgaagagtatttgtcaacagcaaaagccacaaagacgtccctgctcggagcttctcaaatatctgaccacaaacgatgaccctcctcacaccaaacccacagagaacagaaacagcagcagagacaaatgcacctccaaaaagaagtcccacacacagtcgcagtcacaacacttacaagccaaaccaacaactttatctcttcctctgaccccagagtcaccaaatgaccccaagggttccccatttgagaacaagactattgaacgcaccttaagtgtggaactctctggaactgcaggcctaactccacccaccactcctcctcataaagccaaccaagataacccttttagggcttctccaaagctgaagtcctcttgcaagactgtggtgccaccaccatcaaagaagcccaggtacagtgagtcttctggtacacaaggcaataactccaccaagaaagggccggagcaatccgagttgtatgcacaactcagcaagtcctcagtcctcactggtggacacgaggaaaggaagaccaagcggcccagtctgcggctgtttggtgaccatgactattgccagtcaattaattccaaaacagaaatactcattaatatatcacaggagctccaagactctagacaactagaaaataaagatgtctcctctgattggcaggggcagatttgttcttccacagattcagaccagtgctacctgagagagactttggaggcaagcaagcaggtctctccttgcagcacaagaaaacagctccaagaccaggaaatccgagccgagctgaacaagcacttcggtcatcccagtcaagctgtttttgacgacgaagcagacaagaccggtgaactgagggacagtgatttcagtaatgaacaattctccaaactacctatgtttataaattcaggactagccatggatggcctgtttgatgacagcgaagatgaaagtgataaactgagctacccttgggatggcacgcaatcctattcattgttcaatgtgtctccttcttgttcttcttttaactctccatgtagagattctgtgtcaccacccaaatccttattttctcaaagaccccaaaggatgcgctctcgttcaaggtccttttctcgacacaggtcgtgttcccgatcaccatattccaggtcaagatcaaggtctccaggcagtagatcctcttcaagatcctgctattactatgagtcaagccactacagacaccgcacgcaccgaaattctcccttgtatgtgagatcacgttcaagatcgccctacagccgtcggcccaggtatgacagctacgaggaatatcagcacgagaggctgaagagggaagaatatcgcagagagtatgagaagcgagagtctgagagggccaagcaaagggagaggcagaggcagaaggcaattgaagagcgccgtgtgatttatgtcggtaaaatcagacctgacacaacacggacagaactgagggaccgttttgaagtttttggtgaaattgaggagtgcacagtaaatctgcgggatgatggagacagctatggtttcattacctaccgttatacctgtgatgcttttgctgctcttgaaaatggatacactttgcgcaggtcaaacgaaactgactttgagctgtacttttgtggacgcaagcaatttttcaagtctaactatgcagacctagattcaaactcagatgactttgaccctgcttccaccaagagcaagtatgactctctggattttgatagtttactgaaagaagctcagagaagcttgcgcaggtaacatgttccctagctgaggatgacagagggatggcgaatacctcatgggacagcgcgtccttccctaaagactattgcaagtcatacttaggaatttctcctactttacactctctgtacaaaaacaaaacaaaacaacaacaatacaacaagaacaacaacaacaataacaacaatggtttacatgaacacagctgctgaagaggcaagagacagaatgatatccagtaagcacatgtttattcatgggtgtcagctttgcttttcctggagtctcttggtgatggagtgtgcgtgtgtgcatgtatgtgtgtgtgtatgtatgtgtgtggtgtgtgtgcttggtttaggggaagtatgtgtgggtacatgtgaggactgggggcacctgaccagaatgcgcaagggcaaaccatttcaaatggcagcagttccatgaagacacgcttaaaacctagaacttcaaaatgttcgtattctattcaaaaggaaatatatatatatatatatatatatatatatatatatataaattaaaaaggaaagaaaactaacaaccaaccaaccaaccaaccaaccacaaaccaccctaaaatgacagccgctgatgtctgggcatcagcctttgtactctgtttttttaagaaagtgcagaatcaacttgaagcaagctttctctcataacgtaatgattatatgacaatcctgaagaaaccacaggttccatagaactaatatcctgtctctctctctctctctctctctctcttttttttttctttttccttttgccatggaatctgggtgggagaggatactgcgggcaccagaatgctaaagtttcctaacattttgaagtttctgtagttcatccttaatcctgacacccatgtaaatgtccaaaatgttgatcttccactgcaaatttcaaaagccttgtcaatggtcaagcgtgcagcttgttcagcggttctttctgaggagcggacaccgggttacattactaatgagagttgggtagaactctctgagatgtgttcagatagtgtaattgctacattctctgatgtagttaagtatttacagatgttaaatggagtatttttattttatgtatatactatacaacaatgttcttttttgttacagctatgcactgtaaatgcagccttcttttcaaaactgctaaatttttcttaatcaagaatattcaaatgtaattatgaggtgaaacaattattgtacactaacatatttagaagctgaacttactgcttatatatatttgattgtaaaaacaaaaagacagtgtgtgtgtctgttgagtgcaacaagagcaaaatgatgctttccgcacatccatcccttaggtgagcttcaatctaagcatcttgtcaagaaatatcctagtcccctaaaggtattaaccacttctgcgatatttttccacattttcttgtcgcttgtttttctttgaagttttatacactggatttgttaggggaatgaaattttctcatctaaaatttttctagaagatatcatgattttatgtaaagtctctcaatgggtaaccattaagaaatgtttttattttctctatcaacagtagttttgaaactagaagtcaaaaatctttttaaaatgctgttttgttttaatttttgtgattttaatttgatacaaaatgctgaggtaataattatagtatgatttttacaataattaatgtgtgtctgaagactatctttgaagccagtatttctttcccttggcagagtatgacgatggtatttatctgtattttttacagttatgcatcctgtataaatactgatatttcattcctttgtttactaaagagacatatttatcagttgcagatagcctatttattataaattatgagatgatgaaaataataaagccagtggaaattttctacctaggatgcatgacaattgtcaggttggagtgtaagtgcttcatttgggaaattcagcttttgcagaagcagtgtttctacttgcactagcatggcctctgacgtgaccatggtgttgttcttgatgacattgcttctgctaaatttaataaaaacttcagaaaaacctccattttgatcatcaggatttcatctgagtgtggagtccctggaatggaattcagtaacatttggagtgtgtattcaagtttctaaattgagattcgattactgtttggctgacatgacttttctggaagacatgatacacctactactcaattgttcttttcctttctctcgcccaacacgatcttgtaagatggatttcacccccaggccaatgcagctaattttgatagctgcattcatttatcaccagcatattgtgttctgagtgaatccactgtttgtcctgtcggatgcttgcttgattttttggcttcttatttctaagtagatagaaagcaataaaaatactatgaaatgaaagaacttgttcacaggttctgcgttacaacagtaacacatctttaatccgcctaattcttgttgttctgtaggttaaatgcaggtattttaactgtgtgaacgccaaactaaagtttacagtctttctttctgaattttgagtatcttctgttgtagaataataataaaaagactattaagagcaataaattatttttaagaaatcgagatttagtaaatcctattatgtgttcaaggaccacatgtgttctctattttgcctttaaatttttgtgaaccaattttaaatacattctcctttttgccctggattgttgacatgagtggaatacttggtttcttttcttacttatcaaaagacagcactacagatatcatattgaggattaatttatcccccctacccccagcctgacaaatattgttaccatgaagatagttttcctcaatggacttcaaattgcatctagaattagtggagcttttgtatcttctgcagacactgtgggtagcccatcaaaatgtaagctgtgctcctctcatttttatttttatttttttgggagagaatatttcaaatgaacacgtgcaccccatcatcactggaggcaaatttcagcatagatctgtaggatttttagaagaccgtgggccattgccttcatgccgtggtaagtaccacatctacaattttggtaaccgaactggtgctttagtaatgtggatttttttcttttttaaaagagatgtagcagaataattcttccagtgcaacaaaatcaattttttgctaaacgactccgagaacaacagttgggctgtcaacattcaaagcagcagagagggaactttgcactattggggtatgatgtttgggtcagttgataaaaggaaaccttttcatgcctttagatgtgagcttccagtaggtaatgattatgtgtcctttcttgatggctgtaatgagaacttcaatcactgtagtctaagacctgatctatagatgacctagaatagccatgtactataatgtgatgattctaaatttgtacctatgtgacagacattttcaataatgtgaactgctgatttgatggagctactttaagatttgtaggtgaaagtgtaatactgttggttgaactatgctgaagagggaaagtgagcgattagttgagcccttgccgggccttttttccacctgccaattctacatgtattgttgtggttttattcattgtatgaaaattcctgtgattttttttaaatgtgcagtacacatcagcctcactgagctaataaagggaaacgaatgtttcaaatct

SEQ ID NO: 112 - DNA, 60 bp, Homo sapiens
ctgtagtctaagacctgatctatagatacctagaatagccatgtactataatgtgatgat

SEQ ID NO: 113 - DNA, 4099 bp, Homo sapiens
cagctgccagccgaggaggcgcggcggagaggggactgcggtcagctgcgtccacttggggctgtgcggcggtcccgcgcccggcgatgttcccgggcactccctgagtagcggcagcttatcccccgcccgctagcccgccctggtccccggctcgctcgctggctggcgcggccccggccccgctctgcgtcggccccgccgcggtggaggcgcgcgagggggacgcggccggggatgagcggattgcgggtgaactcgccgcccgggggccccgcgaagccgtgagccgctgcttttctccgagtcgccgccctgcccttggatttgagatcatgtccatccacatcgtggcgctggggaacgagggggacacattccaccaggacaaccggccgtcggggcttatccgcacttacctggggagaagccctctggtctccggggacgagagcagcttgttgctgaacgcggccagcacggtcgcgcgtccggtgttcaccgagtatcaggccagtgcgtttgggaatgtcaagctggtggtccacgactgtcccgtctgggacatatttgacagtgattggtacacttctcgaaatctaattgggggcgctgacatcattgtgatcaaatacaacgttaatgacaagttttcattccatgaagtaaaggataattatattccagtgataaaaagagcattaaattcagttccagtaattattgctgctgttggtaccagacaaaatgaagagttaccttgtacatgcccactatgtacctcagacagagggagctgtgttagtacaactgaagggatccaacttgcaaaagaactaggagcaacctatcttgaactccacagccttgatgacttctacataggaaagtattttggaggagtgttggagtattttatgattcaagccttaaatcagaagacaagtgaaaaaatgaagaaaagaaaaatgagcaactcctttcatggaattagaccacctcaacttgaacaaccagaaaaaatgcctgtcttaaaggctgaagcgtcacattataactctgacttaaataacttgctgttctgctgccagtgtgtggacgtggtattttataaccccgatttaaagaaagttgtagaggcccacaagatcgttctctgcgctgtaagccatgttttcatgctgcttttcaatgtgaagagtcccactgacattcaggattccagtatcatccgaactacccaggatctttttgctataaacagagatactgcatttccaggtgctagccatgaatcttcaggcaacccaccattacgagtcattgttaaagacgccctcttctgttcttgtttatcagacatccttcgcttcatttattcaggtgcttttcagtgggaagaattggaagaagatatcaggaagaagttgaaagattctggggatgtttcaaatgtaatcgagaaagttaaatgcattttaaaaacaccaggaaagattaattgcctaaggaattgcaaaacctatcaagccagaaaacctttgtggttttataacacttccctcaagtttttccttaataagccgatgcttgccgatgttgtcttcgaaattcaaggtacgacagtgccagcccacagggccatcctggtggcccgttgtgaagtgatggcagccatgtttaatggtaattacatggaagcaaagagtgtcctgattcccgtttatggtgtttccaaagagactttcttgtcatttttagaatacctgtacacagactcctgctgcccagctggcatattccaggccatgtgtctcctgatctgtgccgagatgtaccaagtgtccagactgcagcacatctgtgagctgttcatcattacccagctgcagagcatgccaagcagggaactggcatccatgaaccttgatatagttgacctgcttaaaaaggccaagtttcaccactctgattgcctttcaacctggctacttcatttcattgctactaactacctcatcttcagtcaaaagcctgaatttcaggatctttcagtggaagaacgcagttttgttgaaaagcacagatggccgtcgaatatgtacttgaagcagcttgcggaatacaggaagtatattcactcccggaaatgtcgttgcttagtaatgtaacctggagcttttatacactacatttcttttttattattatgaagaatgggatacctccaggttccagtaaaattcttctgaccgaaaccaatgtgggtgttagaaaaattaccatatagcttaatatgtttattagttctctttggaaaaaaactaccactgtggtcttaaaagggaacaaaatataccataggctaaaactaaggctttcactctagaatgcaaagctgttttgcagctgttttcccttaaagatgtcctgttgctttagtgatatttagacccctctcagttaagaaatgcttagattaaaaaaaaaaaattacgtaggattaatacagaaatttaatcatgtctgattaattgctctattaaaataaggggcatttaaagacccagcataaccatttgtataatgagaaatctaggggaaaaccaatcagtccaacatgagattttaggaatagaaatttgccggccatttggaaagtgaaatgccacttagttctcaattgatgacagtgtttgaatcatcataaaaaaaatacctgcttttcatctggacaacccaattgagccactttatctccttttggcaatctgagtaggcggggaacctaggcagggctggctttcttagcgtgtaacttgtgtagcagcacagggcccacacttagaaggaccccacacttggttcaaggctctgctatagcggaaattcttaataatgtttgaagaagggccccatgatttcattttgtgctgagccctcaaaattatgtctgtttcgtggtgggaaatatcctatgttttcttgctcaaacacctttctctctgaaagcagaaaaaggcactgatataaagggaagagaaggaggctcaccggagggaagagaacatagtgaagattcccgcctttggggaggtctggaccacccagggcctccactgccaccttggctggcaagggagaaatgtgttgtgttgtcttagctttaaaacagtcacagttcttgctctatcatagatgaacaaatactttcttgatcattctgtaagaccaggaggttggtaagagtgactaaccagcctaactttaatacacatgtataaagatgttcacagagaaagatgctctgtagagaatttgctaccgaagttggctcaagaatttgtttttagtgttatttaccaagattaggacgtcagtggcttaaattctttgaattcttttcaaggactgcaagattatttgataaagagtagcatgaatcttgtgctctaatattacacagtaagttcaaagaaaggatgtaagtcaaagacttgttacatagagggaaaatggactgggatagaggacagactgatagtttctttctttcatatcacatgtatagagaaataattatatcagaaactcacaaacctagacatggaaaaacagattactgtctattgtcagcatcattttcatctgtaagtcactactggaatatatttttcttttaatttccagtgactttagaatacacacagtttttccgacttttcaaaaatttgattaaatggttttatagtataatattgggaccccataccgttagcccttgtatgtataccaacactgccaaagtaaaacattaggtcaggcatggtggctcaggcctgtaatcccagcattttgggaggctgaggcaagtggataacttgaggtcatgagttcgaaaccagcctggccaaaacagtgaaaccccgtctctactaaaaatacaaaattagccagatgtggtggcgcacacctgtaatcccagctactcaggaagctgaggcaggaaaatcgcttgaacctgggaggtggaagttgcagtgagccgagatcgcaccactgcactccagcctgggtgacaagagcgaaactccatctc

SEQ ID NO: 114 - DNA, 60 bp, Homo sapiens
tatatcagaaactcacaaacctagacatggaaaaacagattactgtctattgtcagcatc

SEQ ID NO: 115 - DNA, 1802 bp, Homo sapiens
gggcagctccaccctgggagggactgtggcccaggtactgcccgggtgctactttatgggcagcagctcagttgagttagagtctggaagacctcagaagacctcctgtcctatgaggccctccccatggctttagagacgatctgccgaccctctgggagaaaatccagcaagatgcaagccttcagaatctgggatgttaaccagaagaccttctatctgaggaacaaccaactagttgctggatacttgcaaggaccaaatgtcaatttagaagaaaagatagatgtggtacccattgagcctcatgctctgttcttgggaatccatggagggaagatgtgcctgtcctgtgtcaagtctggtgatgagaccagactccagctggaggcagttaacatcactgacctgagcgagaacagaaagcaggacaagcgcttcgccttcatccgctcagacagcggccccaccaccagttttgagtctgccgcctgccccggttggttcctctgcacagcgatggaagctgaccagcccgtcagcctcaccaatatgcctgacgaaggcgtcatggtcaccaaattctacttccaggaggacgagtagtactgcccaggcctgcctgttcccattcttgcatggcaaggactgcagggactgccagtccccctgccccagggctcccggctatgggggcactgaggaccagccattgaggggtggaccctcagaaggcgtcacaagaacctggtcacaggactctgcctcctcttcaactgaccagcctccatgctgcctccagaatggtctttctaatgtgtgaatcagagcacagcagcccctgcacaaagcccttccatgtcgcctctgcattcaggatcaaaccccgaccacctgcccaacctgctctcctcttgccactgcctcttcctccctcattccaccttcccatgccctggatccatcaggccacttgatgacccccaaccaagtggctcccacaccctgttttacaaaaaagaaaagaccagtccatgagggaggtttttaagggtttgtggaaaatgaaaattaggatttcatgatttttttttttcagtccccgtgaaggagagcccttcatttggagattatgttctttcggggagaggctgaggacttaaaatattcctgcatttgtgaaatgatggtgaaagtaagtggtagcttttcccttctttttcttctttttttgtgatgtcccaacttgtaaaaattaaaagttatggtactatgttagccccataattttttttttccttttaaaacacttccataatctggactcctctgtccaggcactgctgcccagcctccaagctccatctccactccagattttttacagctgcctgcagtactttacctcctatcagaagtttctcagctcccaaggctctgagcaaatgtggctcctgggggttctttcttcctctgctgaaggaataaattgctccttgacattgtagagcttctggcacttggagacttgtatgaaagatggctgtgcctctgcctgtctcccccaccgggctgggagctctgcagagcaggaaacatgactcgtatatgtctcaggtccctgcagggccaagcacctagcctcgctcttggcaggtactcagcgaatgaatgctgtatatgttgggtgcaaagttccctacttcctgtgacttcagctctgttttacaataaaatcttgaaaatgcctaaaaaaaaaaaaaaaaaaaaaaaaaaaaaaaaaaaaaaaaaaaaaaaaaaaa

SEQ ID NO: 116 - DNA, 60 bp, Homo sapiens
caaccaactagttgctggatacttgcaaggaccaaatgtcaatttagaagaaaagataga

SEQ ID NO: 117 - DNA, 2774 bp, Homo sapiens
ttttttgtcctcagccccagcagccgcccggctggctgcagaggccgaggggccgagggcaccggagcgcaagggattccgcggcaccacgtgtccaagccgggctaaggcgggcggagcgggccgggcccggctccccgggcctgagcgcaaaccagcagcgacgcggggtcccgtccgcaccggcacccggcccagccggggcccggtctcccgggcgcacgtaggctcctcctcctggacagcgcgatggggcccttctgggcgagaaaggatgacacaggctgtcctagcagccagtcagtgtctcctgtgaagacaccctcagatgctggaaacagccccattggcttttgccctggaagtgatgaaggcttcaccagaaagaaatgcacgattggaatggttggtgaaggaagcattcagtcctctcgatataagaaggaatcaaagtcaggccttgtgaaaccaggtagtgaagctgattttagctcctcgagcagcacaggcagcatttccgctcctgaggtccatatgtcgactgcgggaagcaagcggtcttcttcttcacgcaatcgaggtcctcatgggcggagtaatggagcttcgtcacacaagcctggcagcagcccatcatccccgcgggaaaaggaccttctgtccatgctgtgcaggaatcagctgagccctgtcaatatccatcccagttatgcaccttcttccccaagcagtagcaactcaggctcctacaaaggaagcgactgtagccccatcatgaggcgttctggaaggtacatgtcttgcggtgaaaatcatggtgtcagacccccaaacccagagcagtatttgactccactgcagcagaaagaggtgacagtgagacacctcaaaaccaagctgaaggaatctgagcgccgactccatgaaagggaaagtgaaatcgtggagcttaagtcccagctggcccgcatgcgagaggactggattgaggaggagtgtcaccgggtagaggcccagttggcactcaaagaagccaggaaagagattaaacagctcaaacaggtcatcgaaaccatgcggagcagcttggctgataaagataaaggcattcagaaatattttgtggacataaacatccaaaacaagaagctggagtctctccttcagagcatggagatggcacacagtggctctctgagggacgaactgtgcctagactttccatgtgattccccagagaagagcttaaccctcaacccccctcttgacacaatggcagatgggttatctctggaagagcaggtcacgggggaaggggctgacagggagctactggtaggagatagcatagccaacagcacaggtttgttcgatgagatagtgacagccaccaccacagaatctggtgacctggagcttgtgcattccacccctggggctaacgtcctggagctgctgcccatagtcatgggtcaggaggagggcagtgtggtggtggagcgagccgttcagaccgacgtggtgccctacagcccagccatctcagagctcattcagagtgtgctgcagaagctccaggacccctgtccctcgagcttggcgtcccctgatgagtctgaaccagactcgatggagagcttcccagagtccctctctgccttagtggttgatttaactccaagaaatccaaactcagccatccttttgtctcccgtggagaccccctacgccaatgtggatgcagaagttcatgcaaaccgcctcatgagagagctggattttgcagcctgcgtggaagagaggttggatggtgtcatcccactggctcgcgggggcgtcgtgaggcagtactggagcagcagcttcctggtggatctcctggctgtggctgcccccgtggtccccacggttctgtgggcattcagtactcagagagggggaacggatcctgtgtataacatcggggccttgctcaggggctgttgcgtggttgccctgcattcgctccgccgcaccgccttccgtatcaaaacctaaatagaagttgttgttaccgtgtgccaatgtgtcccatgtgggttgtgccaggtagagaaacaggaagtcaatcatctgtgacagtctctattctgtcgttttgctccttggtatttgatttgcactatatttagttgaagcctgttcactgtttaaaaccggaggtatcttcaaaggcatggagacctggttccagtaaatgtcccaccagtggggtatagaaagcatgctcatgaccctgccgtgtcgtctgaggtacccgttcttatcctagtggttcaggaagagaaaacgcagtttgcactttcaagacagcttctctaaggctggcatgttatctccttgctttgctttttgccgttttaaaatgtgtaattgttccagcattccaatggtcttgtgcatagcaggggactgtaaccaaaaataaacatgtatttgtgtaattggtttgaagaagtcttgaatagctctttactgtcttacttggggttgataagatttgagtgtttgcaattttttactaaatgtagctccaagtcttaaatggcttgtttgttcttaaactgttaattgatgaaactgtgcataagtttacatgtactaacttattttgcttattatatatagtgttttattggaaattgtaaccacacacttcagcatgatgaaaataaagattagtgtttccatttaaataaatgttttatcctcccataaaaaaaaaaaaaaaaaaa

SEQ ID NO: 118 - DNA, 60 bp, Homo sapiens
ttgccgttttaaaatgtgtaattgttccagcattccaatggtcttgtgcatagcagggga

SEQ ID NO: 119 - DNA, 3139 bp, Homo sapiens
acagacagaaacgagggaagagagagaaattggggaccctgaagaaagggggccagcagcaggtaggtgccatcagggacaagaacagcacctcccagggtgggagaccccaggcctttctggcagcaggtctggatggaaagtggacaggaggctcacccgtctgcatcccctgctcctgcccctgctcggctacaaaaaccaaagggacagcagctgaccacaccccggtagccactcctgcataaagctctcccctcctgtgaccagctgaggacctcaggctgcagcggagccatgcccagatacacggtgcacgtacgtggggaatggctggcagtgccctgccaggacgcgcagctcactgtgggctggctgggccgggaggccgtgaggcgctatatcaagaataagcccgacaatggtggcttcacctccgtggatgacgcgcacttccttgtgcgccggtgcaagggcctgggcctgctggacaacgaggaccggctcgaggtggccctagagaacaacgagttcgtggaagtggttatagagggtgatgccatgtctcctgacttcattccatctcaaccagaaggagtttatctatacagcaagtaccgggagcctgaaaagtacatcgagttagatggagaccgtctgaccacggaggatctggtcaacttgggaaagggacgctacaaaataaagctcaccccaacagctgagaagagggtgcagaaatccagggaggtcatagatagcatcataaaagagaaaacagttgtttacggtattactacaggttttgggaaatttgccagaactgtaattcctatcaataagctacaggagcttcaggtcaacttagtacgctcacattcttcaggtgttgggaaaccactaagtcctgagaggtgtcggatgctcttggctttaaggatcaatgtcttagccaaaggatacagtggcatttccctggagaccctcaaacaagtcatagaaatgtttaatgcctcctgcctgccctatgtcccagagaaaggaaccgttggtgccagtggagaccttgccccactctctcatcttgctcttgggctagttggagaagggaagatgtggtctccgaagagtggctgggctgatgctaaatacgtgctagaagcccatggattgaaaccagttattttaaaaccaaaagagggcctggcactcatcaatgggacgcagatgatcacatccctgggctgtgaagctgtagagcgagccagtgctattgcacggcaggctgacattgtggcagccctgacccttgaggtgctgaagggcaccaccaaagcctttgacactgacattcatgctcttcgacctcaccgtgggcaaattgaagttgcttttcggtttcggtcactcttggactcagatcaccacccatcagaaatagcagagagtcacaggttctgtgatcgcgtccaggatgcatacaccttgcgctgctgtccacaggtccatggtgtggtgaatgatacaatagcatttgtgaagaacatcattaccacagaactgaacagcgcaacagataatcctatggtctttgccaataggggagagacagtttctggaggaaacttccatggtgaatacccagccaaagccctagactacttggccattggcatccatgaacttgctgcaatcagtgagagaagaatcgagcggctctgcaatccctccctcagtgagctgcctgccttcctggtggctgaaggtggtctgaactctgggttcatgatagctcactgcacggcagcagcccttgtttctgagaacaaggctctgtgccatccctcgtctgttgactccctctccaccagcgcagccacggaggaccacgtctccatgggaggatgggcagcaaggaaagccctcagggtcatcgagcatgtggagcaagtgctggccatcgagctccttgcagcctgccagggcatagagtttctacgtcccctgaaaacaaccactccgctggagaaggtctatgacctggtgcgctctgttgtaaggccctggataaaagatcgcttcatggccccggacatcgaggcagcccacaggctgctcctggagcagaaggtttgggaagtagctgctccatacattgaaaaatacagaatggagcatattccagaatcaagacctctttctccaacagccttttcactgcaatttctgcacaagaaatccaccaaaatcccggagtctgaggacctttaatgggctttgtcatgaagtagcagatgagagggcagtcagtttagcacaaagcaatactaggctgaaggagagacctgagaactttcctaggtagatcaatccattgtatcattcagttcttctaaagcctacgttggttaggctgatggcagtattatagttgctaaattcagcactgtgttcctgttgtcgtggttcaagacccaccaggtattttcagattataaaacttttctttctttcttaacagtttcaacaggccactcactcttaagggtgagaagaataaccacaattgtatgtgcctgttttttactcttagcattagatgaattcaaatttggaaacagattgatagcaattttttctaaaaacattagacttttgttaacctttttttttttttttaaatttgcttcaacaagctctccaccagttgactttctttggctaattttactttgcatgatatgccttaatatgccttcataaataaccattttaagtcataatttgtccttaagctgcttttttcttctattaattggatcatagtaaagagtagtcaatagggtcttcagctattaattgtagaggtgattaaaaccaacaaggagtttcatgtgcaaaggagataaggaatgaatataaagattgctatttgggtggctcttattaaactgtgtattttgtacttatcactacacgtatcccccaaatgcttacatgggagtttgaggttagtattttcacttccttggtgttagtactctattcacattcttattgtaaccttcctcatttcacagataaggaatctttggggattaaccaacctcctttctgtaatggtaatcattaaaataag

SEQ ID NO: 120 - DNA, 60 bp, Homo sapiens
tcttcagctattaattgtagaggtgattaaaaccaacaaggagtttcatgtgcaaaggag

SEQ ID NO: 121 - DNA, 409 bp, Homo sapiens
  misc_feature 168, 305: n = A,T,C or G
gtttatccatttattaaaatatttaaagaagcaatactttattaacattgaggactggtgttccatttggcggggggagaggaataggcacactttgtggatcttttttttctgctttttcctgttaccatgtaaataccccagcttcctcccccaaccagcccctgncctgctgcttatttgcaggggcctctgaggaaataaaaaacacagagcagaaaacaacaatggattacagattcactgacaaatagacaaatgcaattccacaaatcatatagccaagcaaggtctcatataggatnggaatggtgctaatgggttttaatgatgtctgaacataattgagatggatatttggtgtttggtcccaccacccaagcaattgtattaattactgcaagtggtt

SEQ ID NO: 122 - DNA, 60 bp, Homo sapiens
ataataccaaagcaaccaaacccattagcaccattccatcctatatgagaccttgcttgg

SEQ ID NO: 123 - DNA, 60 bp, Homo sapiens
aaggacattgttttaatctgtatcgtgccaaagttgtatcactgttaaacttctgaagac

SEQ ID NO: 124 - DNA, 3605 bp, Homo sapiens
ggtaaatatgtgttcattaactgagattaaccttccctgagttttctcacaccaaggtgaggaccatgtccctgtttccatcactccctctccttctcctgagtatggtggcagcgtcttactcagaaactgtgacctgtgaggatgcccaaaagacctgccctgcagtgattgcctgtagctctccaggcatcaacggcttcccaggcaaagatgggcgtgatggcaccaagggagaaaagggggaaccaggccaagggctcagaggcttacagggcccccctggaaagttggggcctccaggaaatccagggccttctgggtcaccaggaccaaagggccaaaaaggagaccctggaaaaagtccggatggtgatagtagcctggctgcctcagaaagaaaagctctgcaaacagaaatggcacgtatcaaaaagtggctgaccttctctctgggcaaacaagttgggaacaagttcttcctgaccaatggtgaaataatgacctttgaaaaagtgaaggccttgtgtgtcaagttccaggcctctgtggccacccccaggaatgctgcagagaatggagccattcagaatctcatcaaggaggaagccttcctgggcatcactgatgagaagacagaagggcagtttgtggatctgacaggaaatagactgacctacacaaactggaacgagggtgaacccaacaatgctggttctgatgaagattgtgtattgctactgaaaaatggccagtggaatgacgtcccctgctccacctcccatctggccgtctgtgagttccctatctgaagggtcatatcactcaggccctccttgtctttttactgcaacccacaggcccacagtatgcttgaaaagataaattatatcaatttcctcatatccagtattgttccttttgtgggcaatcactaaaaatgatcactaacagcaccaacaaagcaataatagtagtagtagtagttagcagcagcagtagtagtcatgctaattatataatatttttaatatatactatgaggccctatcttttgcatcctacattaattatctagtttaattaatctgtaatgctttcgatagtgttaacttgctgcagtatgaaaataagacggatttatttttccatttacaacaaacacctgtgctctgttgagccttcctttctgtttgggtagagggctcccctaatgacatcaccacagtttaataccacagctttttaccaagtttcaggtattaagaaaatctattttgtaactttctctatgaactctgttttctttctaatgagatattaaaccatgtaaagaacataaataacaaatctcaagcaaacagcttcacaaattctcacacacatacatacctatatactcactttctagattaagatatgggacatttttgactccctagaagccccgttataactcctcctagtactaactcctaggaaaatactattctgacctccatgactgcacagtaatttcgtctgtttataaacattgtatagttggaatcatattgtgtgtaatgttgtatgtcttgcttactcagaattaagtctgtgagattcattcatgtcatgtgtacaaaagtttcatccttttcattgccatgtagggttcccttatattaatattcctcagttcatccattctattgttaataggcacttaagtggcttccaatttttggccatgaggaagagaacccacgaacattcctggacttgtcttttggtggacatggtgcactaatttcactacctatccaggagtggaactggtagaggatgaggaaagcatgtattcagctttagtagatattaccagttttcctaagtgattgtatgaatttatgctcctaccggcaatgtgtggcagtcctagatgctctatgtgcttgtaaaaagtcaatgttttcagttctcttgattttcattattcctgtggatgtaaagtgatatttccccatggttttaatctgtatttccccaacatgtaataaggttgaacacttttttatatgcttattgggcacttgggtatcttcttctgtgaagtacccgttcacatttttgtattttgtttaaattagttagccaatatttttcttactgatttttaagttatttttacattctgaatatgtcctttttaatgtgtattacaaatattttgctagtttttgacttgctcctaatgttgaattttgatgaacaaaatttcctaattttgagaaagtcttatttattcatattttctttcaaaattagtgctttttgtgtcatgtttaagaaatttttgcccatcccaaaatcataagatatttttcatgattttgaaaccatgaagagatttttcatgattttgaaatcatgaagatatttttccatttttttctaatagttttattaataaacattctatctattcctggtagaatagatatccacttgagacagcactatgtaggaaagaccatttttcctccactgaactagggtggtgcatttttgtaagttaggtaactgtatgtgtgtgtgtctgtttctgggctgtctattctagtctatttgttgatgcttgtgtcaaacagtacactatcttaattattgtacatttatagttgtaactgtagtccagctttgttcttcttcaagtcaagatttccatataaatattagaaacagtttctcaatttctacaaaatcctgatgaggtttctactgggaccacattgagtctatcaatcaacttatgcagaactggcaacttactactgaatctctaatcaatgttcatcatgtatcgcttcatttaactaggatttctctaacttaattgctatgttttgagatttttagtttaaaaaccttgtatatcttgttttggtggttttagtgattttaataatatattttaaatattttttcttttctattgttgtacacagaaatacagttaagttttgtgtgtagtcttacgatgtttagtaacctcaataagtttatttcttaaatctagtaatttgtagattcctctggattttgtatatgcatagtcatgtaagctgaaaatatggcaatacttgcttcttcccaattgctttaccttttttcttaccttattgcactggttagcaaccccaatacagagaccaccagagcaggtatagactcctgaaagacaatataatgaagtgctccagtcaggcctatctaaactggattcacagctctgtcacttaattgctacatgatctagagccagttactttgtgtttcagccatgtatttgcagctgagagaaaataatcattcttatttcatgaaaattgtggggatgatgaaataagttaacacctttaaagtgtgtagtaaagtatcaggatactatattttaggtcttaatacacacagttatgccgctagatacatgctttttaatgagataatgtgatattatacataacacatatcgatttttaaaaattaaatcaaccttgctttgatggaataaactccatttagtcacaaaaaaaaaaaaaaaaaaaaaaaaaaaaaaaaaaaaa

SEQ ID NO: 125 - DNA, 60 bp, Homo sapiens
aagtatcaggatactatattttaggtcttaatacacacagttatgccgctagatacatgc

SEQ ID NO: 126 - DNA, 3327 bp, Homo sapiens
tcacccgcgcgactatgtttgctgatttttcgccttgccctctttaaaagcggcctcccattctccaaaagacacttcccctcctccctttgaagtgcattagttgtgatttctgcctccttttcttttttctttcttttttgttttgctttttccccccttttgaattatgtgctgctgttaaacaacaacaaaaaaacaacaaaacacagcagctgcggacttgtccccggctggagcccagcgccccgcctggagtggatgagcctctccatgagagatccggtcattcctgggacaagcatggcctaccatccgttcctacctcaccgggcgccggacttcgccatgagcgcggtgctgggtcaccagccgccgttcttccccgcgctgacgctgcctcccaacggcgcggcggcgctctcgctgccgggcgccctggccaagccgatcatggatcaattggtgggggcggccgagaccggcatcccgttctcctccctggggccccaggcgcatctgaggcctttgaagaccatggagcccgaagaagaggtggaggacgaccccaaggtgcacctggaggctaaagaactttgggatcagtttcacaagcggggcaccgagatggtcattaccaagtcgggaaggcgaatgtttcctccatttaaagtgagatgttctgggctggataaaaaagccaaatacattttattgatggacattatagctgctgatgactgtcgttataaatttcacaattctcggtggatggtggctggtaaggccgaccccgaaatgccaaagaggatgtacattcacccggacagccccgctactggggaacagtggatgtccaaagtcgtcactttccacaaactgaaactcaccaacaacatttcagacaaacatggatttactttggccttcccaagtgatcacgctacgtggcaggggaattatagttttggtactcagactatattgaactccatgcacaaataccagccccggttccacattgtaagagccaatgacatcttgaaactcccttatagtacatttcggacatacttgttccccgaaactgaattcatcgctgtgactgcataccagaatgataagataacccagttaaaaatagacaacaacccttttgcaaaaggtttccgggacactggaaatggccgaagagaaaaaagaaaacagctcaccctgcagtccatgagggtgtttgatgaaagacacaaaaaggagaatgggacctctgatgagtcctccagtgaacaagcagctttcaactgcttcgcccaggcttcttctccagccgcctccactgtagggacatcgaacctcaaagatttatgtcccagcgagggtgagagcgacgccgaggccgagagcaaagaggagcatggccccgaggcctgcgacgcggccaagatctccaccaccacgtcggaggagccctgccgtgacaagggcagccccgcggtcaaggctcaccttttcgctgctgagcggccccgggacagcgggcggctggacaaagcgtcgcccgactcacgccatagccccgccaccatctcgtccagcactcgcggcctgggcgcggaggagcgcaggagcccggttcgcgagggcacagcgccggccaaggtggaagaggcgcgcgcgctcccgggcaaggaggccttcgcgccgctcacggtgcagacggacgcggctcgcagctcggtgcaccgccaccccttcctcaatctgaacaccatgcgcccgcggctgcgctacagcccctactccatcccggtgccggtcccggacggcagcagtctgctcaccaccgccctggccgccagcccggcctcggtggcagtggactcgggctctgaactcaacagccgctcctccacgctctcctccagctccatgtccttgtcgcccaaactctgcgcggagaaagaggcggccaccagcgaactgcagagcatccagcggttggttagcggcttggaagccaagccggacaggtcccgcagcgcgtccccgtagacccgtcccagacacgtcttttcattccagtccagttcaggctgccgtgcactttgtcggatataaaataaaccacgggcccgccatggcgttagcccttccttttgcagttgcgtctgggaaggggccccggactccctcgagagaatgtgctagagacagcccctgtcttcttggcgtggtttatatgtccgggatctggatcagattctgggggctcagaaacgtcggttgcattgagctactgggggtaggagttccaacatttatgtccagagcaacttccagcaaggctggtctgggtctctgcccaccaggcggggaggtgttcaaagacatctccctcagtgcggatttatatatatatttttccttcactgtgtcaaagtggaaacaaaaacaaaatctttcaaaaaaaaaatccggacaagtgaacacattaacatgattctgtttgtgcagattaaaaactttatagggacttgcattatcggttctcaataaattactgagcagctttgtttggggagggaagtccctaccatccttgtttagtctatattaagaaaatctgtgtctttttaatattcttgtgatgttttcagagccgctgtaggtctcttcttgcatgtccacagtaatgtatttgtggtttttattttgaacgcttgcttttagagagaaaacaatatagccccctacccttttcccaatcctttgccctcaaatcagtgacccaagggagggggggatttaaagggaaggagtgggcaaaacacataaaatgaatttattatatctaagctctgtagcaggattcatgtcgttctttgacagttctttctctttcctgtatatgcaataacaaggttttaaaaaaataataaagaagtgagactattagacaaagtatttatgtaattatttgataactcttgtaaataggtggaatatgaatgcttggaaaattaaactttaatttattgacattgtacatagctctgtgtaaatagaattgcaactgtcaggttttgtgttcttgttttcctttagttgggtttatttccaggtcacagaattgctgttaacactagaaaacacacttcctgcaccaacaccaataccctttcaaaagagttgtctgcaacatttttgttttcttttttaatgtccaaaagtgggggaaagtgctatttcctattttcaccaaaattggggaaggagtgccactttccagctccacttcaaattccttaaaatataactgagattgct

SEQ ID NO: 127 - DNA, 60 bp, Homo sapiens
ttgggtttatttccaggtcacagaattgctgttaacactagaaaacacacttcctgcacc

SEQ ID NO: 128 - DNA, 2340 bp, Homo sapiens
gtctgaacctctgccagtcctggagactggtgccctgagctccaaccagcgggcctcatcctacaccctcaccaccgcaacttctcacccgagcaagaagcagctcccagagagaaagaacgttcccacctgcctagccatgggagaggacgctgcacaggccgaaaagttccagcaccctgggtctgacatgcggcaggaaaagccctcgagccccagcccgatgccttcctccacaccaagccccagcctgaacctagggaacacagaggaggccatccgggacaactcacaggtgaacgcagtcacggtgctcacgctcctggacaagctggtgaacatgctagacgctgtgcaggagaaccagcacaagatggagcagcgacagatcagtttggagggctccgtgaagggcatccagaatgacctcaccaagctctccaagtaccaggcctccaccagcaacacggtgagcaagctgctggagaagtcccgcaaggtcagcgcccacacgcgcgcggtcaaagagcgcatggataggcagtgcgcacaggtgaagcggctggagaacaaccacgcccagctcctccgacgcaaccatttcaaagtgctcatcttccaggaggaaaatgagatccctgccagcgtgtttgtgaaacagcccgtttccggtgccgtggaagggaaggaggagcttccggatgaaaacaaatccctggaggaaaccctgcacaccgtggacctctcctcagatgatgatttgccccacgatgaggaggccctggaagacagtgccgaggaaaaggtggaagaaagtagggcagagaaaataaaaagatccagcctgaagaaagtggatagcctcaagaaagcattttctcgccagaacatcgagaaaaagatgaacaagctggggacaaagatcgtatctgtagagaggagagagaagattaagaaatctctcacgtcaaatcaccagaaaatatcctcaggaaaaagctcccccttcaaggtttctcccctcactttcgggcggaagaaagtccgagagggagaaagccatgcagaaaatgagaccaagtcagaagacctgcctagcagtgagcagatgccaaatgaccaggaagaggagtcctttgcagagggtcattccgaagcgtccctcgccagcgctctggtggaaggggaaattgcagaggaggctgctgagaaggcgacctccagggggagtaactcggggatggacagcaacatcgacttgactattgtggaagatgaagaggaggagtcagtggccctggaacaggcacagaaggtacgctatgagggtagctacgcgctaacatccgaggaggcggagcgctccgatggggaccccgtgcagcccgccgtgctccaggtgcaccagacctcctgagcttagagccaccgtgccatcctgtgctgtgctcaagcgggcagccagggctgaagaacaaactcttgcacatctccagcacgactcacccactcctgcgttcctgtccaggcagtaatcattgaccatatagtcatagtaagacacacgagaccaggctttaccatgaaagcgacctgtcacggactccacttttaatttgctcttaggttctatctctgtagaatgtctccaagattgaagaagaaactgagcagttgaaaaatgctaatctctttgacttagtcagaaaaaaacagaggataattaagatactagtcatgaaaagtgattcattcttttttgtcattccataagcttgctgaatagtgtaccggtaatatattgtatttccaccgtactctgtgaatctaattattattctttaagtgttgatatataatatacataaatatgtaagctaaacatataactatatgttttaagaagaaaacatctacgaaaggtaaaaagagatgatcagttggttgtttacttgctagaaaccattgttttattgcaaacgaaggaaaaatgaagagattataaaagtcagctaatgaagtaagatacgtagtaaagtcaggactattcaaaaagtaagaaagaaaatttggaaaatgagagaaacaggaaacaaagaatgccgaaaagaatgaaaacagagaaaaaatgtatgtgcttgaaagtaaaatacttacaatagtagcttaactatttcactctttaaataaaaatactaaagaagttcgtatatcctggaataacatgtcatcttcaaaatatttttattttctaatatttttaataataaacattttatagtgttaaagctgtatttttcttaataaataaaggacattacaaataaaaaaaaaaaaaaa

SEQ ID NO: 129 - DNA, 60 bp, Homo sapiens
ttaatttgctcttaggttctatctctgtagaatgtctccaagattgaagaagaaactgag

SEQ ID NO: 130 - DNA, 1541 bp, Homo sapiens
atgccagctgatataatggagaaaaattcctcgtccccggtggctgctaccccagccagtgtcaacacgaatcacacaggatccggagctggtgctgataacagcggaatcccccgtctacctctctccttggtcctggaacagcgctactgatcaccaagtagccacaaaatataataaaccctcagcacttgctcagtagttttgtgaaagtctcaagtaaaagagacacaaacaaaaaattctttttcgtgaagaactccaaaaataaaattctctagagataaaaaaaaaaaaaaaaggaaaatgccagctgatataatggagaaaaattcctcgtccccggtggctgctaccccagccagtgtcaacacgacaccggataaaccaaagacagcatctgagcacagaaagtcatcaaagcctattatggagaaaagacgaagagcaagaataaatgaaagtctgagccagctgaaaacactgattttggatgctctgaagaaagatagctcgcggcattccaagctggagaaggcggacattctggaaatgacagtgaagcacctccggaacctgcagcgggcgcagatgacggctgcgctgagcacagacccaagtgtgctggggaagtaccgagccggcttcagcgagtgcatgaacgaggtgacccgcttcctgtccacgtgcgagggcgttaataccgaggtgcgcactcggctgctcggccacctggccaactgcatgacccagatcaatgccatgacctaccccgggcagccgcaccccgccttgcaggcgccgccaccgcccccaccgggacccggcggcccccagcacgcgccgttcgcgccgccgccgccactcgtgcccatccccgggggcgcggcgccccctcccggcggcgccccctgcaagctgggcagccaggctggagaggcggctaaggtgtttggaggcttccaggtggtaccggctcccgatggccagtttgctttcctcattcccaacggggccttcgcgcacagcggccctgtcatccccgtctacaccagcaacagcggcacctccgtgggccccaacgcagtgtcaccttccagcggcccctcgcttacggcggactccatgtggaggccgtggcggaactgagggggctcaggccacccctcctcctaaactccccaacccacctctcttccctccggactctaaacaggaacttgaatactgggagagaagaggacttttttgattaagtggttactttgtgtttttttaatttctaagaagttactttttgtagagagagctgtattaagtgactgaccatgcactatatttgtatatattttatatgttcatattggattgcgcctttgtattataaaagctcagatgacatttcgttttttacacgagatttcttttttatgtgatgccaaagatgtttgaaaatgctcttaaaatatcttcctttggggaagtttatttgagaaaatataataaaagaaaaaagtaaaggcaaaaaaaaaaaaaaaaaa

SEQ ID NO: 131 - DNA, 60 bp, Homo sapiens
agtcatcaaagcctattatggagaaaagacgaagagcaagaataaatgaaagtctgagcc

SEQ ID NO: 132 - DNA, 1337 bp, Homo sapiens
caaaaacagcaacagaaagcaggacgtgagacttctacctgctcactcagaatcatttctgcaccaaccatggccacgtttgtggagctcagtaccaaagccaagatgcccattgtgggcctgggcacttggaagtctcctctcggcaaagtgaaagaagcagtgaaggtggccattgatgcaggatatcggcacattgactgtgcctatgtctatcagaatgaacatgaagtgggggaagccatccaagagaagatccaagagaaggctgtgaagcgggaggacctgttcatcgtcagcaagttgtggcccactttctttgagagaccccttgtgaggaaagcctttgagaagaccctcaaggacctgaagctgagctatctggacgtctatcttattcactggccacagggattcaagtctggggatgaccttttccccaaagatgataaaggtaatgccatcggtggaaaagcaacgttcttggatgcctgggaggccatggaggagctggtggatgaggggctggtgaaagcccttggggtctccaatttcagccacttccagatcgagaagctcttgaacaaacctggactgaaatataaaccagtgactaaccaggttgagtgtcacccatacctcacgcaggagaaactgatccagtactgccactccaagggcatcaccgttacggcctacagccccctgggctctccggatagaccttgggccaagccagaagacccttccctgctggaggatcccaagattaaggagattgctgcaaagcacaaaaaaaccgcagcccaggttctgatccgtttccatatccagaggaatgtgattgtcatccccaagtctgtgacaccagcacgcattgttgagaacattcaggtctttgactttaaattgagtgatgaggagatggcaaccatactcagcttcaacagaaactggagggcctgtaacgtgttgcaatcctctcatttggaagactatcccttcgatgcagaatattgaggttgaatctcctggtgagattatacaggagattctctttcttcgctgaagtgtgactacctccactcatgtcccattttagccaagcttatttaagatcacagtgaacttagtcctgttatagacgagaatcgaggtgctgttttagacatttatttctgtatgttcaactaggatcagaatatcacagaaaagcatggcttgaataaggaaatgacaattttttccacttatctgatcagaacaaatgtttattaagcatcagaaactctgccaacactgaggatgtaaagatcaataaaaaaaataataatcat

SEQ ID NO: 133 - DNA, 60 bp, Homo sapiens
ttggaagactatcccttcgatgcagaatattgaggttgaatctcctggtgagattataca

SEQ ID NO: 134 - DNA, 2211 bp, Homo sapiens
ttgggggtttattctcttcccttctaacttgacagggtcttgctctgtcattcaggcaagagtgcagtagtgtgatcacttcttactgccgcctcaagcttccagcctcaactcaagcaatcctcccacctcagccacccaagtggctgggactacagattaagaatgacccaaaataaattaaagctttgttccaaagccaatgtgtatactgaagtgcctgatggaggatggggctgggcggtagctgtttcatttttcttcgttgaagtcttcacctacggcatcatcaagacatttggtgtcttctttaatgacttaatggacagttttaatgaatccaatagcaggatctcatggataatctcaatctgtgtgtttgtcttaacattttcagctcccctcgccacagtcctgagcaatcgtttcggacaccgtctggtagtgatgttgggggggctacttgtcagcaccgggatggtggccgcctccttctcacaagaggtttctcatatgtacgtcgccatcggcatcatctctggtctgggatactgctttagttttctcccaactgtaaccatcctatcacaatattttggcaaaagacgttccatagtcactgcagttgcttccacaggagaatgtttcgctgtgtttgctttcgcaccagcaatcatggctctgaaggagcgcattggctggagatacagcctcctcttcgtgggcctactacagttaaacattgtcatcttcggagcactgctcagacccatcattatcagaggaccagcgtcaccgaaaatagtcatccaggaaaatcggaaagaagcgcagtatatgcttgaaaatgagaaaacacgaacctcaatagactccattgactcaggagtagaactaactacctcacctaaaaatgtgcctactcacactaacctggaactggagccgaaggccgacatgcagcaggtcctggtgaagaccagccccaggccaagcgaaaagaaagccccgctattagacttctccattttgaaagagaaaagttttatttgttatgcattatttggtctctttgcaacactgggattctttgcaccttccttgtacatcattcctctgggcattagtctgggcattgaccaggaccgcgctgcttttttattatctacgatggccattgcagaagttttcggaaggatcggagctggttttgtcctcaacagggagcccattcgtaagatttacattgagctcatctgcgtcatcttattgactgtgtctctgtttgcctttacttttgctactgaattctggggtctaatgtcatgcagcatattttttgggtttatggttggaacaataggaggactcacattccactgcttgctgaagatgatgtcgtgggcattgcagaagatgtcttctgcagctggggtctacatcttcattcagagcatagcaggactggctggaccgccccttgcaggtttgttggtggaccaaagtaagatctacagcagggccttctactcctgcgcagctggcatggccctggctgctgtgtgcctcgccctggtgagaccgtgtaagatgggactgtgccagcgtcatcactcaggtgaaacaaaggtagtgagccatcgtgggaagactttacaggacatacctgaagactttctggaaatggatcttgcaaaaaatgagcacagagttcacgtgcaaatggagccggtatgacacactttcttacaacaacagccactgtgttggctggagagggatggggtgggcccaacggggacacaaggaggcagaggagctaacccctctactccactttcaaaactacattttaaagggaatgtgtatgtgaagagcactaccaacatcgcttttgttttgttttgttttgttttaagctttttttttttgcttgtttttaaagccaaaacaaaaaacaaccaagcactcttccatatataaatctggctgtattcagtagcaatacaagagatatgtagaaagactctttggttcacattccgatattaaaatagtgacatgaactggcaaagtggttttaaaagctttcacgtgggataaatgattttctttttttcttttctttcttcctatggtcttgtctgaataaactactctcctgaataaaacaacatccaacccaggtcattgaaatgaaattggccagtc

SEQ ID NO: 135 - DNA, 60 bp, Homo sapiens
ttctttcttcctatggtcttgtctgaataaactactctcctgaataaaacaacatccaac

SEQ ID NO: 136 - DNA, 5761 bp, Homo sapiens
gtcagccttaaacactgactgcacccctcccagatttcttttacattaactaaaaagtcttatcacacaatctcataaaatttatgtaatttcatttaattttagccacaaatcatcttcaaaatgacgaggattttgacagctttcaaagtggtgaggacactgaagactggttttggctttaccaatgtgactgcacaccaaaaatggaaattttcaagacctggcatcaggctcctttctgtcaaggcacagacagcacacattgtcctggaagatggaactaagatgaaaggttactcctttggccatccatcctctgttgctggtgaagtggtttttaatactggcctgggagggtacccagaagctattactgaccctgcctacaaaggacagattctcacaatggccaaccctattattgggaatggtggagctcctgatactactgctctggatgaactgggacttagcaaatatttggagtctaatggaatcaaggtttcaggtttgctggtgctggattatagtaaagactacaaccactggctggctaccaagagtttagggcaatggctacaggaagaaaaggttcctgcaatttatggagtggacacaagaatgctgactaaaataattcgggataagggtaccatgcttgggaagattgaatttgaaggtcagcctgtggattttgtggatccaaataaacagaatttgattgctgaggtttcaaccaaggatgtcaaagtgtacggcaaaggaaaccccacaaaagtggtagctgtagactgtgggattaaaaacaatgtaatccgcctgctagtaaagcgaggagctgaagtgcacttagttccctggaaccatgatttcaccaagatggagtatgatgggattttgatcgcgggaggaccggggaacccagctcttgcagaaccactaattcagaatgtcagaaagattttggagagtgatcgcaaggagccattgtttggaatcagtacaggaaacttaataacaggattggctgctggtgccaaaacctacaagatgtccatggccaacagagggcagaatcagcctgttttgaatatcacaaacaaacaggctttcattactgctcagaatcatggctatgccttggacaacaccctccctgctggctggaaaccactttttgtgaatgtcaacgatcaaacaaatgaggggattatgcatgagagcaaacccttcttcgctgtgcagttccacccagaggtcaccccggggccaatagacactgagtacctgtttgattcctttttctcactgataaagaaaggaaaagctaccaccattacatcagtcttaccgaagccagcactagttgcatctcgggttgaggtttccaaagtccttattctaggatcaggaggtctgtccattggtcaggctggagaatttgattactcaggatctcaagctgtaaaagccatgaaggaagaaaatgtcaaaactgttctgatgaacccaaacattgcatcagtccagaccaatgaggtgggcttaaagcaagcggatactgtctactttcttcccatcacccctcagtttgtcacagaggtcatcaaggcagaacagccagatgggttaattctgggcatgggtggccagacagctctgaactgtggagtggaactattcaagagaggtgtgctcaaggaatatggtgtgaaagtcctgggaacttcagttgagtccattatggctacggaagacaggcagctgttttcagataaactaaatgagatcaatgaaaagattgctccaagttttgcagtggaatcgattgaggatgcactgaaggcagcagacaccattggctacccagtgatgatccgttccgcctatgcactgggtgggttaggctcaggcatctgtcccaacagagagactttgatggacctcagcacaaaggcctttgctatgaccaaccaaattctggtggagaagtcagtgacaggttggaaagaaatagaatatgaagtggttcgagatgctgatgacaattgtgtcactgtctgtaacatggaaaatgttgatgccatgggtgttcacacaggtgactcagttgttgtggctcctgcccagacactctccaatgccgagtttcagatgttgagacgtacttcaatcaatgttgttcgccacttgggcattgtgggtgaatgcaacattcagtttgcccttcatcctacctcaatggaatactgcatcattgaagtgaatgccagactgtcccgaagctctgctctggcctcaaaagccactggctacccattggcattcattgctgcaaagattgccctaggaatcccacttccagaaattaagaacgtcgtatccgggaagacatcagcctgttttgaacctagcctggattacatggtcaccaagattccccgctgggatcttgaccgttttcatggaacatctagccgaattggtagctctatgaaaagtgtaggagaggtcatggctattggtcgtacctttgaggagagtttccagaaagctttacggatgtgccacccatctatagaaggtttcactccccgtctcccaatgaacaaagaatggccatctaatttagatcttagaaaagagttgtctgaaccaagcagcacgcgtatctatgccattgccaaggccattgatgacaacatgtcccttgatgagattgagaagctcacatacattgacaagtggtttttgtataagatgcgtgatattttaaacatggaaaagacactgaaagggctcaacagtgagtccatgacagaagaaaccctgaaaagggcaaaggagattgggttctcagataagcagatttcaaaatgccttgggctcactgaggcccagacaagggagctgaggttaaagaaaaacatccacccttgggttaaacagattgatacactggctgcagaatacccatcagtaacaaactatctctatgttacctacaatggtcaggagcatgatgtcaattttgatgaccatggaatgatggtgctaggctgtggtccatatcacattggcagcagtgtggaatttgattggtgtgctgtctctagtatccgcacactgcgtcaacttggcaagaagacggtggtggtgaattgcaatcctgagactgtgagcacagactttgatgagtgtgacaaactgtactttgaagagttgtccttggagagaatcctagacatctaccatcaggaggcatgtggtggctgcatcatatcagttggaggccagattccaaacaacctggcagttcctctatacaagaatggtgtcaagatcatgggcacaagccccctgcagatcgacagggctgaggatcgctccatcttctcagctgtcttggatgagctgaaggtggctcaggcaccttggaaagctgttaatactttgaatgaagcactggaatttgcaaagtctgtggactacccctgcttgttgaggccttcctatgttttgagtgggtctgctatgaatgtggtattctctgaggatgagatgaaaaaattcctagaagaggcgactagagtttctcaggagcacccagtggtcctgacaaaatttgttgaaggggcccgagaagtagaaatggacgctgttggcaaagatggaagggttatctctcatgccatctctgaacatgttgaagatgcaggtgtccactcgggagatgccactctgatgctgcccacacaaaccatcagccaaggggccattgaaaaggtgaaggatgctacccggaagattgcaaaggcttttgccatctctggtccattcaacgtccaatttcttgtcaaaggaaatgatgtcttggtgattgagtgtaacttgagagcttctcgatccttcccctttgtttccaagactcttggggttgacttcattgatgtggccaccaaggtgatgattggagagaatgttgatgagaaacatcttccaacattggaccatcccataattcctgctgactatgttgcaattaaggctcccatgttttcctggccccggttgagggatgctgaccccattctgagatgtgagatggcttccactggagaggtggcttgctttggtgaaggtattcatacagccttcctaaaggcaatgctttccacaggatttaagataccccagaaaggcatcctgataggcatccagcaatcattccggccaagattccttggtgtggctgaacaattacacaatgaaggtttcaagctgtttgccacggaagccacatcagactggctcaacgccaacaatgtccctgccaccccagtggcatggccgtctcaagaaggacagaatcccagcctctcttccatcagaaaattgattagagatggcagcattgacctagtgattaaccttcccaacaacaacactaaatttgtccatgataattatgtgattcggaggacagctgttgatagtggaatccctctcctcactaattttcaggtgaccaaactttttgctgaagctgtgcagaaatctcgcaaggtggactccaagagtcttttccactacaggcagtacagtgctggaaaagcagcatagagatgcagacaccccagccccattattaaatcaacctgagccacatgttatctaaaggaactgattcacaactttctcagagatgaatattgataactaaacttcatttcagtttactttgttatgccttaatattctgtgtcttttgcaattaaattgtcagtcacttcttcaaaaccttacagtccttcctaagttactcttcatgagatttcatccatttactaatactgtatttttggtggactaggcttgcctatgtgcttatgtgtagctttttactttttatggtgctgattaatggtgatcaaggtaggaaaagttgctgttctattttctgaactctttctatactttaagatactctatttttaaaacactatctgcaaactcaggacactttaacagggcagaatactctaaaaacttgataaaatgaaatatagatttaatttatgaaccttccatcatgatgtttgtgtattgcttctttttggatcctcattctcacccatttggctaatccaggaatattgttatcccttcccattatattgaagttgagaaatgtgacagaggcatttagagtatggacttttcttttctttttctttttctttttttctttttgagatggagtcacactctccaggctggagtgcagtggcacaatctcggctcactgcaatttgcgtctcccaagttcaagcgattctcctgctttagactatggatttctttaaggaatactggtttgcagttttgttttctggactatatcagcagatggtagacagtgtttatgtagatgtgttgttgtttttatcattggattttaacttggcccgagtgaaataatcagatttttgtcattcacactctcccccagttttggaataacttggaagtaaggttcattcccttaagacgatggattctgttgaactatggggtcccacactgcactattaattccacccactgtaagggcaaggacaccattccttctacatataagaaaaaagtctctccccaagggcagcctttgttacttttaaatattttctgttattacaagtgctctaattgtgaacttttaaataaaatactattaagaggtaaaaaaaaaaaaaaa

SEQ ID NO: 137 - DNA, 60 bp, Homo sapiens
tggctaatccaggaatattgttatcccttcccattatattgaagttgagaaatgtgacag

SEQ ID NO: 138 - DNA, 4859 bp, Homo sapiens
cacgttgggtgacataatggggtttttttaattatagattcacactgcatttattcatcacccctgtcctctcatccataactcaaatttactaccagcaacacaaaatacaaagatgtgtccagtttcactacagctcttcgcgtttacaagtgtcgagcgcttgctttcggaacgcccttgtgattggccgagccaatgccagtgacatcaaccaacttacttttgattggaaggctggttgctgggactgtagcgtttgcaggaagtcacttaactgtttgggagctggaaaaccgaagctgaagttctcttttgccataggaacgagcgcaactgactaggaaagatgtgtcccaaagctccgcaagctggaacgtgagccaggaggcccggaccggccacgggaccgcgaggcactccgaaagtgtgcggctgccccttccctgcctcccagctgttacccttttaaatgtcagtgttcgaggctgtaggggtagcacgaggcagcgaaacggaacagtcggattggccgcacgcctcagttctagacgcacctctccaccgaagccgttctgactggcagggggagaaagtaaacagagttgaatcaccctccccactggccaattggagggggtttggtttgtgacgtgatgggattctgcgaaattgttactgagcaagagaatgccggaacgtgcggaccggccggagcaggggttcagaagccgtcagtggactcgggaaaaagtgtctcttagacctggcgctcggcggggccctcgccacccgcgtcggggtgatcgggtgaatgtcctggggctttggctcgacggcgaggcggccgagggcgtgcacctctcttgcagtttcctctcccagcgcctcgggggcgttttcagtcgaataaacttgcgaccgccacgtgtggcatctttccaagggagccggctcagaggggccggcgcgcccgtcgggggatcgcggccggcgcggggcaggggcggcggctagaggcggcggcgcggcggagcccggggccgtggatgctgcgtgcggaggcgctgccggttacgtaaagatgaggggctgaggtcgcctcggcgctcctgcgagtcggaagcgccccgcgcccccgcccccttggccgccgcgccgtgccgggcgggcgggtcgtcgtccgaggccagggagggcgagccgaacctccgcagccaccgccaagtttgtccgcgccgcctgggctgccgtcgcccgcaccatgtccgcggccgcctacatggacttcgtggctgcccagtgtctggtttccatttcgaaccgcgctgcggtgccggagcatggggtcgctccggacgccgagcggctgcgactacctgagcgcgaggtgaccaaggagcacggtgacccgggggacacctggaaggattactgcacactggtcaccatcgccaagagcttgttggacctgaacaagtaccgacccatccagaccccctccgtgtgcagcgacagtctggaaagtccagatgaggatatgggatccgacagcgacgtgaccaccgaatctgggtcgagtccttcccacagcccggaggagagacaggatcctggcagcgcgcccagcccgctctccctcctccatcctggagtggctgcgaaggggaaacacgcctccgaaaagaggcacaagtgcccctacagtggctgtgggaaagtctatggaaaatcctcccatctcaaagcccattacagagtgcatacaggtgaacggcccttcccctgcacgtggccagactgccttaaaaagttctcccgctcagacgagctgacccgccactaccggacccacactggggaaaagcagttccgctgtccgctgtgtgagaagcgcttcatgaggagtgaccacctcacaaagcacgcccggcggcacaccgagttccaccccagcatgatcaagcgatcgaaaaaggcgctggccaacgctttgtgaggtgctgcccgtggaagccagggagggatggaccccgaaaggacaaaagtactcccaggaaacagacgcgtgaaaactgagccccagaagaggcacacttgacggcacaggaagtcactgctctttggtcaatattctgattttcctctccctgcattgtttttaaaaagcacattgtagcctaagatcaaagtcaacaacactcggtccccttgaagaggcaactctctgaacccgtctctgactgttggagggaaggcaaatgcttttgggttttttggtttttgtttttgtttttttttctccttttatttttttgcgggggagggtagggagtgggtgggggggagggggtaaggccaagactgggtagattttaaagattcaacactggtgtacatatgtccgctgggtgagttgacctgtggcctcgcacagtgattctaggccctttatgcttgctgtctctcagaattgttttcttaccttttaatgtaatgacgagtgtgcttcagtttgtttagcaaaaccactctcttgaatcacgttaacttttgagattaaaaaaaaaaacgccatagcacagctgtctttatgcaagcaagagcacatctactccagcatgatctgtcatctaaagacttgaaaacaaaaaacagttacttatagtcaatgggtaagcagagtctgaatttatactaatcaagacaaacctttgaaaggttacactaagtacagaacttttaaaccttgctttgtatgagttgtactttttgaacataagctgcacttttattttctaatgcagaggatgaataagttaaatacatgctttgaggatagaagcagatgttctgtttggcaccacgttataatctgcttattttacaatatacacgtttccctaagaaatcatgcgcagagatgtgagggcagaatatacacaacagatgctgaaggagaaggagggtagtgttttgcaaaagaaaaagaaaagaaccaacagaattttaactctattaacttttccaaattttcctatgcttttagttaacatcattattgtatcctaatgccactaggggagagagcttttgactctgttgggttttatttgaatgtgtgcataacagtaatgagatctggaaacacctattttttggggaaaaaggtttgttggtctccttcctgtgttcctacaaaactcccactctcaggtgcaagagttatgtagaaggaaagggagctgaaataggaacagaaaaatcaacccctataactagtgaacaccaagggaaaataccacaatgatttcagaggagactctgcaaaatcgtcccttgtggagaatgcaggcaacatggaatactacgaatgaaatcacatcactgtatcttttacatcaatagcctcaccactaatatatcttgtatctaggtgtctataatggctgaaaccactacatccatctatgccatttacctgaaaacttaactgtggcctttatgaggccagaaaagtgaactgagttttgtagttaagacctcaaatgaggggagtcagcagtgatcatgggggaaatgtttacattttttttttcttcagaagtaacgctttctgatgattttatctgatatttaaaacagggagctatggtgcactctagtttatacttgcgctctgaaatgtgtaaacatagggtgcctacctatttcacctgacccatactcgtttctgattcagaatcagtgtgggctcctgcagtgggcgcgggtcacggctgactccaacttccaatacaacagccatcactagcacagtgtttttttgtttaaccaacgtagtgttattagtagttctataaagagaactgcttttaacattagggactgggagcagtccatgggataaaaaggaaagtgttttctcacgagaaaacatgtcaggaaaaataaagaacactttctacctctgtttcagatttttgaaacacttattttaaaccaaattttaatttctgtgtccaaaataagttttaaggacatctgttcttccatacgaaataggttaggctgcctatttctcactgagctcatggaatggttctgcttatgatactctgcacgctgccttttagtgagtgaggagtttggggttgcctagcacttgctaacttgtaaaaagtcatctttccctcacagaaagaaacgaaagaaagcaaagcaaagtcagtgaaagacaatctttatagtttcaggagtaaatctaaatgtggcttttgtcaagcacttagatggatataaatgcagcaacttgttttaaaaaaatgcacatttacttcccaaaaaagttgttacttgccttttcaagtgtgacaaactcacatttgatattctcttatatgttatagtaatgtaacgtataaactcaagcctttttattctttgtgattaaatcctgttttaaaatgtcacaaaacaggaaccagcattctaattagatttactatatcaagatatggttcaaataggactactagagttcattgaacactaaaactatgaaacaattactttttatattaaaaagaccatggatttaacttatgaaaatccaaatgcaggatagtaatttttgtttacttttttaaccaaactgaatttttgaaagactattgcaggtgtttaaaaagaaagaaaagttgttttatctaatactgtaagtagttgtcatattctggaaaatttaatagttttagagttaagatatctcctctctttggttagggaagaagaaagcccttcaccattgtggaatgatgccctggctttaaggtttagctccacatcatgcttctctt

SEQ ID NO: 139 - DNA, 60 bp, Homo sapiens
aaatgcacatttacttcccaaaaaagttgttacttgccttttcaagtgtgacaaactcac

SEQ ID NO: 140 - DNA, 701 bp, Homo sapiens
ctaggctccaagctcaggacctcaggatgggagatgaggagaagcggaacagggccatcacggcccgcaggcagcacctgaagagcgtgatgctgcagatagcggccacggagctggagaaggaggagagccgccgtgaggcagagaagcagaactacctggcggagcactgcccgccgctgcatatcccgggctccatgtctgaagtgcaggagctctgcaaacagctgcacgccaagatcgatgcggctgaagaggagaagtacgacatggaggtgagggtgcagaagaccagcaaggagctggaggacatgaaccagaagctatttgatctgcggggcaagttcaagcggcccccactgcggagggtgcgcatgtcggccgatgccatgctcaaggccctgctgggctcgaagcacaaggtgtgcatggacctgagggccaacctgaagcaggtcaagaaggaggacacagagaaggagcgggacctgcgagacgtgggtgactggaggaagaacatcgaggagaagtctggcatggagggccggaagaagatgtttgagtccgagtcctaggccactcgctgcccctacgcctgccccggtgcccggctcccagcagaacatactagggagatgcacccagagcctgccagggagggctggcctcaccaccaccgtcaataaaggatttgaatcccc

SEQ ID NO: 141 - DNA, 60 bp, Homo sapiens
ctctgcaaacagctgcacgccaagatcgatgcggctgaagaggagaagtacgacatggag

SEQ ID NO: 142 - DNA, 2340 bp, Homo sapiens
gcggccgcgtcgacccggcgcagaaaccgtaaaaggctggagcgggcggggtaggtgtggctctgtgtgcgtgacctgagccccggtcccagtccctgtagtctcctgcggccgcggcctctcagccatgggcgccgtctggtccgccctgctggttggagggggtctggccggagcacttttcgtttggctgctgcggggcggccctggcgacaccgggaaggacggggatgcggagcaggagaaagacgcccctcttgggggagctgcgattccgggaggccatcagagtggcagcagcggactgagccctggaccttccgggcaggagctggtcaccaaaccagagcatcttcaagaaagcaatggacatttgatttctaagaccaaagaccttggtaaactgcaagcagcatcatggagattgcagaatccttccagggaagtctgtgacaattcaagagaacatgttccttctggacagtttccagacacagaagctccagctacctctgagaccagtaactctaggagttactctgaagtttcaagaaatgaaagccttgaatctcctatgggagaatggggattccaaaaaggacaagagatatctgctaaagcagctacatgttttgcagagaagttgccttctagcaacctgctcaagaacagagctaaagaagaaatgagcctctctgatttgaacagtcaggaccgggttgaccacgaggagtgggaaatggtgcctaggcactcatcttggggggatgttggtgtgggtggcagtcttaaggctccagtgttaaacctaaaccagggaatggacaatggaagaagcactttggtggaagcaagaggtcagcaagtgcatgggaaaatggaaagggtagcagtgatgcctgcagggtctcagcaagttagtgtcaggttccaggtccattatgtcacaagcactgatgtgcaattcattgcagtaactggagaccatgagtgtcttgggagatggaacacttacatcccactccactataacaaggatgggttctggtctcattccattttcctgcctgcagatacagtggtggagtggaagtttgtgttggtagagaatgggggagttacccgctgggaagaatgcagcaatagattcctagaaactggccatgaggataaagtggttcacgcatggtgggggattcactgattcagtttgcaaagtaatggagaagctgtagaacaatgtggaagaggctgaggttgtggaacacactgaataaaataaaggcagtgtgactccaaattcagccatctgaattgtttaaatttgctagtggattttgtctactgtgcagaaatatatatgtctaatgtgcagaaatatatatgtgtgtatgtgtgtatatatatgcacacacacacagataatgcttccagtgaatgtgaacttcttttccctgtggcactgattgacagacttgtgctgatccattattactttagggcttgattctcttggggagtgacttggctaagcttcaggtgtaaactgtggtcacggagcaaaaacattaaccagctgcccagggttcaagcttgagcctttaggtgatctttaaactatggtagtaaaataagcctcactcaaacatagctgacttcctattggtacagcttgaaaagcactttttactacatacacattttatgcttaaaaagttaacatgatacgaaactgtgattagaaaatatctggtctggatgtgattagtaaggatacaagataatgttctaagactgcctaatgctttttgtttgattttcatctgccaggcgttgttatgtgctatgagggtagcaagtacgtctttgtcttaatgatctaaggctggtgtagaaacaaagggcctaatgagaaccaatcatcatggaagtcagttgcgggggcagcccataaggaaagggaaagtgagtggggttgggcataggctgagtgaggtggcctgaatgacacctcttagaggactgtgaagtacaggcacagcccgactgcagggagggatgcacccatcatttacccatgggagcatctgtaggaccatctctctcccacttcttctcccctcccccaccgcatctggccagatggactgtcctacagcaatcgtttccatctgtcaccctcttccctctcctttcataccagtcactatcttgggtaacaaatttatacaggacagtggtacagaaatacatctttgctctgagaatacagcaaatattaacttaaattattataactgaacaaataataaaacctgaattttaatatcttcaaaaaaa

SEQ ID NO: 143 - DNA, 60 bp, Homo sapiens
ctggtctggatgtgattagtaaggatacaagataatgttctaagactgcctaatgctttt

SEQ ID NO: 144 - DNA, 997 bp, Homo sapiens
gaaggaaaaagagcaacagatccagggagcattcacctgccctgtctccaaacagccttgtgcctcacctacccccaacctcccagagggagcagctatttaaggggagcaggagtgcagaacaaacaagacggcctggggatacaactctggagtcctctgagagagccaccaaggaggagcaggggagcgacggccggggcagaagttgagaccacccagcagaggagctaggccagtccatctgcatttgtcacccaagaactcttaccatgaagaccctcctactgttggcagtgatcatgatctttggcctactgcaggcccatgggaatttggtgaatttccacagaatgatcaagttgacgacaggaaaggaagccgcactcagttatggcttctacggctgccactgtggcgtgggtggcagaggatcccccaaggatgcaacggatcgctgctgtgtcactcatgactgttgctacaaacgtctggagaaacgtggatgtggcaccaaatttctgagctacaagtttagcaactcggggagcagaatcacctgtgcaaaacaggactcctgcagaagtcaactgtgtgagtgtgataaggctgctgccacctgttttgctagaaacaagacgacctacaataaaaagtaccagtactattccaataaacactgcagagggagcacccctcgttgctgagtcccctcttccctggaaaccttccacccagtgctgaatttccctctctcataccctccctccctaccctaaccaagttccttggccatgcagaaagcatccctcacccatcctagaggccaggcaggagcccttctatacccacccagaatgagacatccagcagatttccagccttctactgctctcctccacctcaactccgtgcttaaccaaagaagctgtactccggggggtctcttctgaataaagcaattagcaaaaaaaaaaaaaaaaaaaaaaaaaaaaaa

SEQ ID NO: 145 - DNA, 60 bp, Homo sapiens
tttgctagaaacaagacgacctacaataaaaagtaccagtactattccaataaacactgc

SEQ ID NO: 146 - DNA, 1339 bp, Homo sapiens
gaattccgattagtgtgatctcagctcaaggcaaaggtgggatatcatggcatctatctgggttggacaccgaggaacagtaagagattatccagactttagcccatcagtggatgctgaagctattcagaaagcaatcagaggaattggaactgatgagaaaatgctcatcagcattctgactgagaggtcaaatgcacagcggcagctgattgttaaggaatatcaagcagcatatggaaaggagctgaaagatgacttgaagggtgatctctctggccactttgagcatctcatggtggccctagtgactccaccagcagtctttgatgcaaagcagctaaagaaatccatgaagggcgcgggaacaaacgaagatgccttgattgaaatcttaactaccaggacaagcaggcaaatgaaggatatctctcaagcctattatacagtatacaagaagagtcttggagatgacattagttccgaaacatctggtgacttccggaaagctctgttgactttggcagatggcagaagagatgaaagtctgaaagtggatgagcatctggccaaacaagatgcccagattctctataaagctggtgagaacagatggggcacggatgaagacaaattcactgagatcctgtgtttaaggagctttcctcaattaaaactaacatttgatgaatacagaaatatcagccaaaaggacattgtggacagcataaaaggagaattatctgggcattttgaagacttactgttggccatagttaattgtgtgaggaacacgccggcctttttagccgaaagactgcatcgagccttgaagggtattggaactgatgagtttactctgaaccgaataatggtgtccagatcagaaattgaccttttggacattcgaacagagttcaagaagcattatggctattccctatattcagcaattaaatcggatacttctggagactatgaaatcacactcttaaaaatctgtggtggagatgactgaaccaagaagataatctccaaaggtccacgatgggctttcccaacagctccaccttacttcttctcatactatttaagagaacaagcaaatataaacagcaacttgtgttcctaacaggaattttcattgttctataacaacaacaacaaaagcgattattattttagagcatctcatttataatgtagcagctcataaatgaaattgaaaatggtattaaagatctgcaactactatccaacttatatttctgctttcaaagttaagaatctttatagttctactccattaaatataaagcaagataataaaacggaattc

SEQ ID NO: 147 - DNA, 60 bp, Homo sapiens
ttcagcaattaaatcggatacttctggagactatgaaatcacactcttaaaaatctgtgg

SEQ ID NO: 148 - DNA, 2881 bp, Homo sapiens
atccactcaggtctacaggctcttagaactagaacttagaactttatcttgaaaatgtaccactgttgcagaagctcctcacagagtatgtgtcaggcatttttaacctgctaaaggcaagaagaagtgttcaccacatagttgcaaaggtcttcaacttgccacagccaacagaaaaatcaaaatgattgaaccctttgggaatcagtatattgtggccaggccagtgtattctacaaatgcttttgaggaaaatcataaaaagacaggaagacatcataagacatttctggatcatctcaaagtgtgttgtagctgttccccacaaaaggccaagagaattgtcctctctttgttccccatagcatcttggttgccagcataccggcttaaagaatggttgctcagtgatattgtttctggtatcagcacagggattgtggccgtactacaaggtttagcatttgctctgctggtcgacattcccccagtctatgggttgtatgcatcctttttcccagccataatctaccttttcttcggcacttccagacacatatccgtgggtccgtttccgattctgagtatgatggtgggactagcagtttcaggagcagtttcaaaagcagtcccagatcgcaatgcaactactttgggattgcctaacaactcgaataattcttcactactggatgacgagagggtgagggtggcggcggcggcatcagtcacagtgctttctggaatcatccagttggcttttgggattctgcggattggatttgtagtgatatacctgtctgagtccctcatcagtggcttcactactgctgctgctgttcatgttttggtttcccaactcaaattcatttttcagttgacagtcccgtcacacactgatccagtttcaattttcaaagtactatactctgtattctcacaaatagagaagactaatattgcagacctggtgacagctctgattgtccttttggttgtatccattgttaaagaaataaatcagcgcttcaaagacaaacttccagtgcccattccaatcgaattcattatgaccgtgattgcagcaggtgtatcctacggctgtgactttaaaaacaggtttaaagtggctgtggttggggacatgaatcctggatttcagccccctattacacctgacgtggagactttccaaaacaccgtaggagattgcttcggcatcgcaatggttgcatttgcagtggccttttcagttgccagcgtctattccctcaaatacgattatccacttgatggcaatcaggagttaatagccttgggactgggtaacatagtctgtggagtattcagaggatttgctgggagtactgccctctccagatcagcagttcaggagagcacaggaggcaaaacacagattgctgggcttattggtgccatcatcgtgctgattgtcgttctagccattggatttctcctggcgcctctacaaaagtccgtcctggcagctttagcattgggaaacttaaagggaatgctgatgcagtttgctgaaataggcagattgtggcgaaaggacaaatatgattgtttaatttggatcatgaccttcatcttcaccattgtcctgggactcgggttaggcctggcagctagtgtggcatttcaactgctaaccatcgtgttcaggacccaatttccaaaatgcagcacgctggctaatattggaagaaccaacatctataagaataaaaaagattattatgatatgtatgagccagaaggagtgaaaattttcagatgtccatctcctatctactttgcaaacattggtttctttaggcggaaacttatcgatgctgttggctttagtccacttcgaattctacgcaagcgcaacaaagctttgaggaaaatccgaaaactgcagaagcaaggcttgctacaagtgacaccaaaaggatttatatgtactgttgacaccataaaagattctgacgaagagctggacaacaatcagatagaagtactggaccagccaatcaataccacagacctgcctttccacattgactggaatgatgatcttcctctcaacattgaggtccccaaaatcagcctccacagcctcattctcgacttttcagcagtgtcctttcttgatgtttcttcagtgaggggccttaaatcgattttgcaagaatttatcaggatcaaggtagatgtgtatatcgttggaactgatgatgacttcattgagaagcttaaccggtatgaattttttgatggtgaagtgaaaagctcaatatttttcttaacaatccatgatgctgttttgcatattttgatgaagaaagattacagtacttcaaagtttaatcccagtcaggaaaaagatggaaaaattgattttaccataaatacaaatggaggattacgtaatcgggtatatgaggtgccagttgaaacaaaattctaatcaacatataattcagaaggatcttcatctgactatgacataaaaacaactttatacccagaaagttattgataagttcatacattgtacgaagagtatttttgacagaatatgtttcaaactttggaacaagatggttctagcatggcatatttttcacatatctagtatgaaattatataagtattctaaattttatatcttgtagctttatcaaagggtgaaaattattttgttcatacatatttttgtagcactgacagatttccatcctagtcactaccttcatgcataggtttagcagtatagtggcgccactgttttgaatctcataatttatacaggtcatattaatatatttccattaaaaaatcagttgtacagtgaaaaaaaaaaagaaaa

SEQ ID NO: 149 - DNA, 60 bp, Homo sapiens
ttttgtagcactgacagatttccatcctagtcactaccttcatgcataggtttagcagta

SEQ ID NO: 150 - DNA, 60 bp, Homo sapiens
tttcttaaagtgagagcacgcctgtactagagcaagcaggaatcagagaccttccagaaa

SEQ ID NO: 151 - DNA, 2433 bp, Homo sapiens
cagccgcggcccatggagcccgccggcccggcccccggccgcctcgggccgctgctctgcctgctgctcgccgcgtcctgcgcctggtcaggagtggcgggtgaggaggagctgcaggtgattcagcctgacaagtccgtatcagttgcagctggagagtcggccattctgcactgcactgtgacctccctgatccctgtggggcccatccagtggttcagaggagctggaccagcccgggaattaatctacaatcaaaaagaaggccacttcccccgggtaacaactgtttcagagtccacaaagagagaaaacatggacttttccatcagcatcagtaacatcaccccagcagatgccggcacctactactgtgtgaagttccggaaagggagccctgacacggagtttaagtctggagcaggcactgagctgtctgtgcgtgccaaaccctctgcccccgtggtatcgggccctgcggcgagggccacacctcagcacacagtgagcttcacctgcgagtcccacggcttctcacccagagacatcaccctgaaatggttcaaaaatgggaatgagctctcagacttccagaccaacgtggaccccgtaggagagagcgtgtcctacagcatccacagcacagccaaggtggtgctgacccgcgaggacgttcactctcaagtcatctgcgaggtggcccacgtcaccttgcagggggaccctcttcgtgggactgccaacttgtctgagaccatccgagttccacccaccttggaggttactcaacagcccgtgagggcagagaaccaggtgaatgtcacctgccaggtgaggaagttctacccccagagactacagctgacctggttggagaatggaaacgtgtcccggacagaaacggcctcaaccgttacagagaacaaggatggtacctacaactggatgagctggctcctggtgaatgtatctgcccacagggatgatgtgaagctcacctgccaggtggagcatgacgggcagccagcggtcagcaaaagccatgacctgaaggtctcagcccacccgaaggagcagggctcaaataccgccgctgagaacactggatctaatgaacggaacatctatattgtggtgggtgtggtgtgcaccttgctggtggccctactgatggcggccctctacctcgtccgaatcagacagaagaaagcccagggctccacttcttctacaaggttgcatgagcccgagaagaatgccagagaaataacacaggacacaaatgatatcacatatgcagacctgaacctgcccaaggggaagaagcctgctccccaggctgcggagcccaacaaccacacggagtatgccagcattcagaccagcccgcagcccgcgtcggaggacaccctcacctatgctgacctggacatggtccacctcaaccggacccccaagcagccggcccccaagcctgagccgtccttctcagagtacgccagcgtccaggtcccgaggaagtgaatgggaccgtggtttgctctagcacccatctctacgcgctttcttgtcccacagggagccgccgtgatgagcacagccaacccagttcccggagggctggggcggtgcaggctctgggacccaggggccagggtggctcttctctccccacccctccttggctctccagcacttcctgggcagccacggccccctcccccaacattgccacacacctggaggctgacgttgccaaaccagccagggaaccaacctgggaagtggccagaactgcctggggtccaagaactcttgtgcctccgtccatcaccatgtgggttttgaagaccctcgactgcctccccgatgctccgaagcctgatcttccagggtggggaggagaaaatcccacctcccctgacctccaccacctccaccaccaccaccaccaccaccaccaccactaccaccaccacccaactggggctagagtggggaagatttcccctttagatcaaactgccccttccatggaaaagctggaaaaaaactctggaacccatatccaggcttggtgaggttgctgccaacagtcctggcctcccccatccctaggcaaagagccatgagtcctggaggaggagaggacccctcccaaaggactggaagcaaaaccctctgcttccttgggtccctccaagactccctggggcccaactgtgttgctccacccggacccatctctcccttctagacctgagcttgcccctccagctagcactaagcaacatctcgctgtaagcgcctgtaaattactgtgaaatgtgaaacgtgcaatcttgaaactgaggtgttagaaaacttgatctgtggtgttttgttttgttttttttcttaaaacaacagcaacgtgaaaaaaaaaaaaaaaaa

SEQ ID NO: 152 - DNA, 60 bp, Homo sapiens
gcctgtaaattactgtgaaatgtgaaacgtgcaatcttgaaactgaggtgttagaaaact

SEQ ID NO: 153 - DNA, 2901 bp, Homo sapiens
cagcctccctctcccacctctgtctgcccgctgcctcttgtctagctgctgtcaggagctgactgcctccagggctggaatcctgtgctccctctgtgcccagagccccacgatgtcggccaacgccacactgaagccactctgccccatcctggagcagatgagccgtctccagagccacagcaacaccagcatccgctacatcgaccacgcggccgtgctgctgcacgggctggcctcgctgctgggcctggtggagaatggagtcatcctcttcgtggtgggctgccgcatgcgccagaccgtggtcaccacctgggtgctgcacctggcgctgtccgacctgttggcctctgcttccctgcccttcttcacctacttcttggccgtgggccactcgtgggagctgggcaccaccttctgcaaactgcactcctccatcttctttctcaacatgttcgccagcggcttcctgctcagcgccatcagcctggaccgctgcctgcaggtggtgcggccggtgtgggcgcagaaccaccgcaccgtggccgcggcgcacaaagtctgcctggtgctttgggcactagcggtgctcaacacggtgccctatttcgtgttccgggacaccatctcgcggctggacgggcgcattatgtgctactacaatgtgctgctcctgaacccggggcctgaccgcgatgccacgtgcaactcgcgccaggcggccctggccgtcagcaagttcctgctggccttcctggtgccgctggcgatcatcgcctcgagccacgcggccgtgagcctgcggttgcagcaccgcggccgccggcggccaggccgcttcgtgcgcctggtggcagccgtcgtggccgccttcgcgctctgctgggggccctaccacgtgttcagcctgctggaggcgcgggcgcacgcaaacccggggctgcggccgctcgtgtggcgcgggctgcccttcgtcaccagcctggccttcttcaacagcgtggccaacccggtgctctacgtgctcacctgccccgacatgctgcgcaagctgcggcgctcgctgcgcacggtgctggagagcgtgctggtggacgacagcgagctgggtggcgcgggaagcagccgccgccgccgcacctcctccaccgcccgctcggcctcccctttagctctctgcagccgcccggaggaaccgcggggccccgcgcgtctcctcggctggctgctgggcagctgcgcagcgtccccgcagacgggccccctgaaccgggcgctgagcagcacctcgagttagaacccggcccacgtagggcggcactcacacgcgaaagtatcaccagggtgccgcggttcaattcgatatccggactcctgccgcagtgatcaaagtccgaggggcgggacccaggcacctgcattttaaagcgccccgggagactctgaatctttttcagaaacagtgagttaaagcagtgcttctcaaaccttgatgtgcctgtgaatcacctaggggtcttgttaagtgcagtctgatccaggaggccggggccgggtactgagagtctgcacttaacaagctcccaggccgagaagccagtgcggcaggttcacaggcgaggcctggagtaacacaaagtgaaactcgtaatagacttcccactctagggcagtggagtcggaagggcacacggggtgcgtctccccggagttcagttttaccagatgatgggggaggggggaaggagttttatgttaaaccatccatgtatttttggagaagagagaggaaaggtttgagaagcactgttccagcctgccctcttcatttagccaatgcttactgcgctagacgcttcatcccacaatcttaaggggcagcttctattagccagtctttacagctgagcacattctggctcagggaggttaagtgacttgcccagtttcagggctaacgaccacagggtctgcactctaaccctaggcatcacatgctcaatgactctctggtgagcgaggacattctctgacctactcgagggacttaagatgctaccttgtgacccagcactgcccaaagtgcttccaaggcagaagcagcaggggatggcgtggtcaagcactcgggaaacctggggctaatcaaatccaatgggggaaatgactaaaagtcttcggtcgttagaagttgaatgggcacagcaactctaagactacagcacacgtcatttcttagctaagcggaccagcctccctgtcggcctggtgttctgtgggatccctctgggcactggtaatcccaagatctgtgcagccccgcctccaggccacatggggctgggcagctaccatttcccttttgcggatgggaggggtaacttgcacctctgacctatcacttccactgcaccccgtctcattcctccacctgccgtggacttggggtcagagactgctgtgtttgagctctgcagcccagggaccgaaaagttggtgtcaatgaattttgcttggtggatgaaatgtcagtggaagaagcagatgagaaactcttgagatcttggtcctgtgttttttctgccaccaaaggccagggtcactgaaggcctggcccacagcaggtgctgagcaaagggaacagtgaggtgcccagctagctgcagagccaccctgtgttgacacctcgcccctgctccctcccatcccttccccctttactcatagcacttcccccattggacacgtggtgcattttgcttgtttattatgttttctctccatcagaatgaaagctcctcgagggcagggactttggtctattgtctgtatttgccggtgcctaggattgtgcctgtatgcaacaggcactcaataaatatttttgctgtagactgg

SEQ ID NO: 154 - DNA, 60 bp, Homo sapiens
gtcagtggaagaagcagatgagaaactcttgagatcttggtcctgtgttttttctgccac

SEQ ID NO: 155 - DNA, 1512 bp, Homo sapiens
agcagttggggcaggaggaagccgactgctgcctggtctgcaaagaagtcctttcaagtctctaggactggactcttcctaagcaagtccgagaaggaagcaccctcactatgtggctctacctggcggccttcgtgggcctgtactaccttctgcactggtaccgggagaggcaggtggtgagccacctccaagacaagtatgtctttatcacgggctgtgactcgggctttgggaacctgctggccagacagctggatgcacgaggcttgagagtgctggctgcgtgtctgacggagaagggggccgagcagctgaggggccagacgtctgacaggctggagacggtgaccctggatgttaccaagatggagagcatcgctgcagctactcagtgggtgaaggagcatgtgggggacagaggactctggggactggtgaacaatgcaggcattcttacaccaattaccttatgtgagtggctgaacactgaggactctatgaatatgctcaaagtgaacctcattggtgtgatccaggtgaccttgagcatgcttcctttggtgaggagagcacggggaagaattgtcaatgtctccagcattctgggaagagttgctttctttgtaggaggctactgtgtctccaagtatggagtggaagccttttcagatattctgaggcgtgagattcaacattttggggtgaaaatcagcatagttgaacctggctacttcagaacgggaatgacaaacatgacacagtccttagagcgaatgaagcaaagttggaaagaagcccccaagcatattaaggagacctatggacagcagtattttgatgccctttacaatatcatgaaggaagggctgttgaattgtagcacaaacctgaacctggtcactgactgcatggaacatgctctgacatcggtgcatccgcgaactcgatattcagctggctgggatgctaaatttttcttcatccctctatcttatttacctacatcactggcagactacattttgactagatcttggcccaaaccagcccaggcagtctaaagaaaactgggttggtgcttcttggaatgaaggcaaaaatctgaaattgttagtgtctcagtaatcctgatttagaacccaggctttttgtaacaatgtgttttcttgcctaaattcatttatctggcatcatcagagtactaacatgtttatatttcagatatccaaagcttaccactttaggtgatgaatctttactattttagcccttttttgatgagactatttgtctaaagtgaatcatttgttcttgccttattaaacagagtagatggaaaacaatttaacctattttgaagtcatttctttatgaatatgaataattgttctatgctttaataatctattgtgaggaaactactaagaaatatgttggtgtgtttgtccttacttgaaatgggtctgtattatggtacttttaataaatatttgatttttctttctcttc

SEQ ID NO: 156 - DNA, 60 bp, Homo sapiens
ctggcatcatcagagtactaacatgtttatatttcagatatccaaagcttaccactttag

SEQ ID NO: 157 - DNA, 1647 bp, Homo sapiens
gcctgagaccctcctgcagccttctcaagggacagccccactctgcctcttgctcctccagggcagcaccatgcagcccctgtggctctgctgggcactctgggtgttgcccctggccagccccggggccgccctgaccggggagcagctcctgggcagcctgctgcggcagctgcagctcaaagaggtgcccaccctggacagggccgacatggaggagctggtcatccccacccacgtgagggcccagtacgtggccctgctgcagcgcagccacggggaccgctcccgcggaaagaggttcagccagagcttccgagaggtggccggcaggttcctggcgttggaggccagcacacacctgctggtgttcggcatggagcagcggctgccgcccaacagcgagctggtgcaggccgtgctgcggctcttccaggagccggtccccaaggccgcgctgcacaggcacgggcggctgtccccgcgcagcgcccgggcccgggtgaccgtcgagtggctgcgcgtccgcgacgacggctccaaccgcacctccctcatcgactccaggctggtgtccgtccacgagagcggctggaaggccttcgacgtgaccgaggccgtgaacttctggcagcagctgagccggccccggcagccgctgctgctacaggtgtcggtgcagagggagcatctgggcccgctggcgtccggcgcccacaagctggtccgctttgcctcgcagggggcgccagccgggcttggggagccccagctggagctgcacaccctggaccttggggactatggagctcagggcgactgtgaccctgaagcaccaatgaccgagggcacccgctgctgccgccaggagatgtacattgacctgcaggggatgaagtgggccgagaactgggtgctggagcccccgggcttcctggcttatgagtgtgtgggcacctgccggcagcccccggaggccctggccttcaagtggccgtttctggggcctcgacagtgcatcgcctcggagactgactcgctgcccatgatcgtcagcatcaaggagggaggcaggaccaggccccaggtggtcagcctgcccaacatgagggtgcagaagtgcagctgtgcctcggatggtgcgctcgtgccaaggaggctccagccataggcgcctagtgtagccatcgagggacttgacttgtgtgtgtttctgaagtgttcgagggtaccaggagagctggcgatgactgaactgctgatggacaaatgctctgtgctctctagtgagccctgaatttgcttcctctgacaagttacctcacctaatttttgcttctcaggaatgagaatctttggccactggagagcccttgctcagttttctctattcttattattcactgcactatattctaagcacttacatgtggagatactgtaacctgagggcagaaagcccaatgtgtcattgtttacttgtcctgtcactggatctgggctaaagtcctccaccaccactctggacctaagacctggggttaagtgtgggttgtgcatccccaatccagataataaagactttgtaaaacatgaataaaacacattttattctaaaaaaaaaaaaaaaaaaaaaaaaaaaaaaaa

SEQ ID NO: 158 - DNA, 60 bp, Homo sapiens
tcttattattcactgcactatattctaagcacttacatgtggagatactgtaacctgagg

SEQ ID NO: 159 - DNA, 6577 bp, Homo sapiens
ttttcgtctatgtttctgatctgctttcaggaagaattattcatttttatcttcccaatctgaatgttttattgaatttttattttccaagttaataaaacctttggttattatcctgtctttgttttacagtgtcctgctcttgatgcgtggatgcagattttgtctctctgtggacgttaatgattgtggtctgaggggaagtcttttctgctccctgtgttgccctcattttctctgagttctctttattttggtggtctcagtctctatctttcacgttgtgaatttttctcaaatatatggtgatcctatggatctgttcatgttttaagagtgaggcatccaaaagctgattggaagttgtgtgtgccaactggtgagcttttccactagggtcaccaggtgggcacctggactcatcattggagaacactgcctgtcagtatttgcacgtgttttctctggggctcattctgtttcttgagagatattcccactactctccttcctgggaaacgggcatacacagggcttttagcctatgctgagtactcatgtggtttcaaaaatggtgtcccatctgggcagaagtccccatgagcacttggcttgactggcaaaggacaccttttgccccttcctccagacatacccagctctgagcttggacaatgctcgaggaacaatgaaaaggctagattttaactcctaattgccctctttagccaagtgcctctgtgcaatgcacaactgtaggaccatatccagagaccctggtctatactcagtgtgcccgagtcctgaccgctgagcaggcagcctcatcacccgtgagtatttagactttcattaagttgcttcaacctttgctgtgcctggtgtccctgagttggagctgctctgatttctccatggagtaggagcacagtggtcatctggctgcatgggaaggacaggggacctcagagccaataaatgccctggtcttcagccccatgtctcaccccatccctcctattccaatccccaagcctctcctggaggccacagggcatctctgctgaccactctgtggcctcccctctgcaggcatgtggttttaggatccccctccctgctcacttttccatcagttccattcctgcataaataggttgctagctcttgcttactgttctcttctgtattctgtgttcatggttgtattaatataactttcattcctctgctcctattttcatggggtttcatgagggaagaaacaggctcatgtgttcagtataccatcttgatccataaaccccatttgagttatctcacaggttgcttagggggcttgctgctctgactggtttgtgaacgtgccctgagtccagctgggactgcagcaacatccatcctgttgagctgtggtctgctaagtgattttgtgtaatgctgtgccaagtgcaggagagggatacatagcatggctaagctctgcttgaatgccatgattagttattaccttccttccttccccctggttttgctgcctattgtcagtaaatgatcttagatctcctgcctccccaaagatatagtctatgtggtggtctgggttctaggttttctttaccacccttgcttcacttaagaaacagaaaactggctaggcacagtagtggctcacacctataatcccagccctttgggaggccaaggcaggaggatcgcttgaggccaggaattcaagaccagcctgcacaacatagcaagactccatctctacaaaaagttaaatttaaattagtggtggcatgcacttatagtcccagctactcgggaggatgaggcaggagaattgtttgagcccatgactttgaggttactgtgagctgtgatcctgctattttactccacctgagtgacagagcgagacgctgtctcaaaaataaagaaacaagtagtccacacaggtgtttgccagcaaacaaacagcgcggattctctgttgaacgtggccaacattgcctcgtcgaagtttgtatcttgccatagttgatgatcaggtggtcggggcttcctggtcagacctgacctttgtggggagatgttctcccaccaaggctcagaagcaggacactcttgctgcccctcgggcagccacccagaacatgggcgtctccatttctgaggttcagcatagttccccccaccctcttcccatgcagtgcatgcctgctctttatcaggatggaacagagggaaggcagaggcactgggggcagcctgtgttgttgatctctgtaagtcacagactgttcgaaaacctcaggaattatgtaagcgttcagtgcctcatttaagagatgaaaaactgaagattagaaagaggaaacgactagtcgccctgctagttgatgacctccagatagccatcttcattcccagttaagtttactacaaaaccacagcctcagctgctgaagctaacctccctacccaccatcgctagggactcagaacaccatggagctcatctctccaacaaaagtcagaattagcaagtacagatgtgtcttacgaaaatgtcagaatccatcatggctgctttggtgaggagctgttctccttccgtggtcatgccattggaaggcagttgtatgacaagaatgctttcacatgagctccgattttcttaactctccagaaggacttcagaagcctctggagttttgagacgcggcctctctctcccttctgcttggagacaccttcctgggggtctccactgcattccccgccggtattcctctgtggagccttgcgccctcaggtcccagaaatgggctgtgtgggagcttccagtcagcctggtatctcgggaccttctcagccaggaaatgagactgcacaaagccctgtgaggcccagctgtgttatttctccttccccgacattgcataatcactgctgacacagcatttggggaagatttaacgtcttgggccagcagctgccatctggaaccatcaccacatagcaggttgttctgtcccatccaactgatgagggggctgccctaatgacaaggtccaggacctgggttgggtggtggaaggctgggagctggagtgggcattattgtgcttctgtgctgaaaattgctatggctcttttcccctaacagccagcgtgggagaaccaaacatgagacacaagcatccccttgagctccacagatcttgcgccttgctctcatcaggcatttccttggagaacagcagtcagcagctcatggaagtgagcccggtgcacagactttgcatggactttgcacaggttccatttccatcgtgtgcagacacctgtatctttgggctccacgtgagcacctgccctcttcactctgattttttttttaagagacagcatcttactctgtcaccgaggctggagtacagtggtgtgatcacagctcactgcagcctgaaactcctgggctcaggcaatcctcctgcctcagcctcccgagtggctggtagtacaggtgcatgccaccacgcccacctaatttttttatcttttatagatacaggtctcactgttgctcaggctggtctcgaactcctggcctcaggtgatcctcctgccttggcctaccaaaatgctgggattataggcatgaaccactgtgcctggccttcactctgatttttcttaagagtcctacaggaccttcaggtcttgtcacttctctaccattgtgtgtgagacagggcatggggtgagcttggtcaggtgtgggtcaaaagcctggagactcagagctgctggttccccaagagcccacaaaagttatcagagtttctgagctgagtgttctgcagttgccagaccccacaatgctgggaatactggcttctttgtgtttagaacttgttctgagaaccttgatgagaacacatcaagcaagcagttcctcccagccagggctggagcaacatgccaaaaaacattcttgtctatgggaaaaagacaaccagtattttgtactgtttgaccaagttgtttttaaatatacacatgcctcaacaatccacggcctcaatcgcactgctaatttgtttaaatccctgacactcagatgtcaagaatagcttcatctagcagtgttctctttaaaggaacccttttttttgttttcattttaatcactgccttcttctctgggaggtattgtgggctagagaaagaagtcaggtttgggagtcagccagatttagattggagtcccagctctgtcaccagatctctgggtgatcttggcaaactaacttctgagcttctgtgcattataggcattcagcacatatttgttggatgaaaaatacttttcttgaaagtttatgaagttgtaggatgcccagcagcccccttttctctatttccttcctcttgaagcaagcgttgactatacctctttccctaacccttagtgtaccatagcttcttccaacctctctccaatccattacttttttctgagctaccctgtctcaaatctaactcaggcctttttgcaagaggaagtttaagccattgtttactcattaactcacttgacccttagaacaatcgtgggaggtgtttatttcggaaaggaagctaaagcacaggacagaaaaataaggtcatagcgtgaactagtaagtagcagaactgggaacataggactgttattttcaaacactctaaacttcactgcagttgcaaatttgcaaccaaaatggccgccttgaaagggtcttttgcagtaaaatctcagtgtccaacatcaaagacagttcttcagggcctccaattaactatacatcctgcccccagctgctcatctctgcacctctaacacgtacttcacagagtaggaaattgggctttctccttcaaaaagaaaagtagagaaggcctgagggcagtgtaattaaaatggagaagtagagaccacgaattacttggatgaattcataactggttggtctctgaggcagggattattatttttcctgtattttaagcttaaaagtagtgatttttgcattgttacaaaaaacaaaatagcaaaatatcatttgatacttgtattctgtttgcaatagctaccacttcctttagccccagcaaaaatcaataggtgtgtattctctacaagcccatgctgtgccagaatgccagtattgctaaatgtcatgcaaggatttagacacttttttaaaggaaactctgggagtgcctgttgtctggagagttgacattgtccaaagcaggccaacactggtatgggtatggagaacccacgtcctagctgtggctcacctgcagatgccttgaatttacctctctgggttggaagtgggaagacttcttttaaaagtcctttctaagtttaaaaatccaaaggttacgaaggtagtttttatttatctcaataagtggcctatttgcttaaagcaagtgtacctctgtatatcagcccaaagcttagggcagtgcttcttggctttagtatctgagaaaggtgcctttgggaagagtttggtcagacagaaggtagtctgaatcttaaaggtttcagatgaatgtttgaagtagaacctgggaaatctgcttcctagggctgttagaaggaaattggtctccttaaattacgtcagcatctgaggcagtttcctaagggaatttcttttaaattcaaaagttcaactgcaggaataaatagctgtacaggactagatcttcccatccctcatcttttccccttccccgagtaacgactcaaaaaggcttctgaaattctactcagaatcggagccgtttgcattccaacaaggatcccttaagccaaatgctggtgtgtttgtgtagaatgtccctggggtaggggcggtagctgtggggagggaatgtggtgcaggggacacctgccctctgcccttgaaattgcaccataagatgctgcctatgtcactcacagtggtgctgatactatccgccaaagacaaattgtgaacacggaaaaatggtcgttccctactgtacatcctcaggacagacttaactaaacttggagacaggagattgttcagaccatattgtagtgggtggtgatcattgttttattttgggggagtctggtctattgagcagatttaatgtttccttattgtgcagggcttaattgactatgtctgaaagtttttactgagagctctaagaaaactattgaggaaaatgaaatgttattttgtagtacaaggattatttttgtctatttaggatatacatagctgtagctttgtaaaaaaaaagatctttataaacaatatatgaatgtgccgtcttatttattgattactgtaaattaagatataaatggctatttgcataatttatacctgtgggaattaactggagtatttgttatttgactgttttctattaaggaatattaggcttggtgctatgatgaatgatcttgtaaaatcatgtgtattcttaagaaaatttttgaatataaatttcttgaactgac

SEQ ID NO: 160 - DNA, 60 bp, Homo sapiens
cagggcttaattgactatgtctgaaagtttttactgagagctctaagaaaactattgagg

SEQ ID NO: 161 - DNA, 2430 bp, Homo sapiens; identical to SEQ ID NO: 73

SEQ ID NO: 162 - DNA, 60 bp, Homo sapiens
aatgactgacatcatcactttgtttggtctcagttctaattccaaaaagtaattccactg

SEQ ID NO: 163 - DNA, 1605 bp, Homo sapiens
gggactcagaggcgaagcttgaggggctcaggaaggacgaagaaccacccttgagagaagaggcagcagcagcggcggcagcagcagcggcagcgaccccaccactgccacatttgccaggaaacaatgctgctagcgacattcaagctgtgcgctgggagctcctacagacacatgcgcaacatgaaggggctgaggcaacaggctgtgatggccatcagccaggagctgaaccggagggccctggggggccccacccctagcacgtggattaaccaggttcggcggcggagctctctactcggttctcggctggaagagactctctacagtgaccaggagctggcctatctccagcagggggaggaggccatgcagaaggccttgggcatccttagcaaccaagagggctggaagaaggagagtcagcaggacaatggggacaaagtgatgagtaaagtggtcccagatgtgggcaaggtgttccggctggaggtcgtggtggaccagcccatggagaggctctatgaagagctcgtggagcgcatggaagcaatgggggagtggaaccccaatgtcaaggagatcaaggtcctgcagaagatcggaaaagatacattcattactcacgagctggctgccgaggcagcaggaaacctggtggggccccgtgactttgtgagcgtgcgctgtgccaagcgccgaggctccacctgtgtgctggctggcatggacacagacttcgggaacatgcctgagcagaagggtgtcatcagggcggagcacggtcccacttgcatggtgcttcacccgttggctggaagtccctctaagaccaaacttacgtggctactcagcatcgacctcaaggggtggctgcccaagagcatcatcaaccaggtcctgtcccagacccaggtggattttgccaaccacctgcgcaagcgcctggagtcccaccctgcctctgaagccaggtgttgaagaccagcctgctgttcccaactgtgcccagctgcactggtacacacgctcatcaggagaatccctactggaagcctgcaagtctaagatctccatctggtgacagtgggatgggtggggttcgtgtttagagtatgacactaggattcagattggtgaagtttttagtaccaagaaaacagggatgaggctcttggattaaaaggtaacttcattcactgattagctatgacatgagggttcaggcccctaaaataattgtaaaactttttttctgggcccttatgtacccacctaaaaccatctttaaaatgctagtggctgatatgggtgtgggggatgctaaccacagggcctgagaagtcttgctttatgggctcaagaatgccatgcgctggcagtacatgtgcacaaagcagaatctcagagggtctcctgcagccctctgctcctcccggccgctgcacagcaacaccacagaacaagcagcaccccacagtgggtgccttccagaaatatagtccaagctttctctgtggaaaaagacaaaactcattagtagacatgtttccctattgctttcataggcaccagtcagaataaagaatcataattcacacc

SEQ ID NO: 164 - DNA, 60 bp, Homo sapiens
cgtgtttagagtatgacactaggattcagattggtgaagtttttagtaccaagaaaacag

SEQ ID NO: 165 - DNA, 1079 bp, Homo sapiens
gaattcggcacgagagcactccaagcactgctgtcttctcacagagtcttgaagccagagcagcgccaggatgtcacgggagctggccccactgctgcttctcctcctctccatccacagcgccctggccatgaggatctgctccttcaacgtcaggtcctttggggaaagcaagcaggaagacaagaatgccatggatgtcattgtgaaggtcatcaaacgctgtgacatcatactcgtgatggaaatcaaggacagcaacaacaggatctgccccatactgatggagaagctgaacagaaattcaaggagaggcataacgtacaactatgtgattagctctcggcttggaagaaacacatataaagaacaatatgcctttctctacaaggaaaagctggtgtctgtgaagaggagttatcactaccatgactatcaggatggagacgcagatgtgttttccagggagccctttgtggtctggttccaatctccccacactgctgtcaaagacttcgtgattatccccctgcacaccaccccagagacatccgttaaggagatcgatgagttggttgaggtctacacggacgtgaaacaccgctggaaggcggagaatttcattttcatgggtgacttcaatgccggctgcagctacgtccccaagaaggcctggaagaacatccgcttgaggactgaccccaggtttgtttggctgatcggggaccaagaggacaccacggtgaagaagagcaccaactgtgcatatgacaggattgtgcttagaggacaagaaatcgtcagttctgttgttcccaagtcaaacagtgtttttgacttccagaaagcttacaagctgactgaagaggaggccctggatgtcagcgaccactttccagttgaatttaaactacagtcttcaagggccttcaccaacagcaaaaaatctgtcactctaaggaagaaaacaaagagcaaacgctcctagacccaagggtctcatcttattaaccatttcttgcctctaaataaaatgtctctaacaaaaaaaaaaaaaaaaaaaaaaaaaaaaactcgag

SEQ ID NO: 166 - DNA, 60 bp, Homo sapiens
caaacgctcctagacccaagggtctcatcttattaaccatttcttgcctctaaataaaat

SEQ ID NO: 167 - DNA, 2487 bp, Homo sapiens
actcagccctggcctcgccgagctctgttcttagactctcacccgtcccgcacgttcctggtcgcctggcgttctgattcgcccgcccgggccccgccaccccctcctcagctgacggggcaaaagctgctccgagaggagaaggtcaagtcctccgcccgggccgggccgagcggagcccagggagcgcagcatccgcgcggctaccgcggcggcgcaggagttataaagtcggcgcgcgagactccgccgccacccggcagccccggcgcagctccggcagccgcagtcgcagcgcccccagcgtggcgccccccggccgggcctgccgcccgggacccgggctggggcgcagagggagcccggagcccggcgcccccatgcgccgccccgccgccgccgcgccacagctatgaccctgagcactgagatgtccgatgcctctggcctcgccgaggaaacagacatcgacgtggtgggggagggcgaggacgaagaagacgaggaagaggaggacgacgacgagggcggcggtggcgggccccggctggctgtccccgcgcagcggcggcggcggcggcgctcgtacgccggggaggacgagctggaggatctggaggaggaggaggacgacgatgacatcctgctggccccgcctgctgggggctccccggcgcccccgggcccggccccggcggcgggggcaggagccggtgggggcggcggcggcggcggcgcgggcggcggcgggagcgcgggtagcggcgccaagaacccgctggtgaagccgccctactcgtatatcgcgctcatcactatggccatcctgcagagccccaagaagcggctgacgctgagcgagatctgtgagttcatcagcggccgcttcccctactaccgggagaagttccccgcctggcagaacagcatccgccacaacctctcgctcaacgactgcttcgtcaagatcccccgcgagcccggcaacccgggcaagggcaactactggacgctggacccggagtccgccgacatgttcgacaacggcagcttcctgcgccggaggaagcgcttcaagcggcagccgctgctcccacccaacgccgcggccgccgagtctctgctgctgcgcggcgcgggagccgcagggggcgcgggcgacccggcagccgccgccgcgctcttcccgcccgcgcccccgccgcccccgcatgcctacggctacggcccctacggctgcggctacggcctgcagctgccgccttacgcgccgccctcggccctcttcgccgccgcagcggccgccgccgccgccgccgccttccacccgcactcgcccccgccgcccccgccaccgcacggcgcggccgccgagctggcccggaccgccttcggctaccggccgcacccgctcggcgccgccctacccggccccctgccggcctccgcggccaaggcgggcggcccgggcgcctcagcgctggcgcgctcgcccttctccatcgagagcatcatcgggggcagcttgggcccggccgccgctgccgccgccgccgcgcaggccgccgccgccgctcaggcctcgccctcgccctcgccggtggcggcgccgccagctcccggatccagcggaggaggctgcgcggcgcaggcggccgtgggcccggcggccgcgctcacccgatccctcgtggccgccgcggccgccgccgcctcctcagtctcctcgtccgccgccttggggactctgcaccaagggactgccctgtccagtgtcgagaactttactgctaggatttccaattgttaataacgctatgttagcgcgctcgaggaagaaggtaggaatcccggctccttttctcgtcttggtggttcggtgttttgttcgctcctccaggcgcggcccctctcgacctcgcgcgcccattttcgccgctgcgaattctcggacaaaactgtcaacagcccgggcgcgccttttggctctgcgggtccctctatttatgcaaagccgacctatgctacagccccccaacccccgacctggggtagggaggaagagggtgccggggaagggagtccgccctgtccaggcactagaggctcccttgacgtttggcagatgaaaaacaactaagcctttttgaggtgtagagattctcaggtccaggcgttaaaaaataatggtcaaaagaataatacaaaaatagtaaaggtcttgaagaatgccagcgaagcaattcttttttatttgaggacacttgtctggtgtactttttcatgaaaaggaaaaatggttaacatgtttacacaagaaaaaaagtcaaaattatcatttatttcaacctgtgttttgtatcataacagacgtgtggatttttttgtacttactgcgtattctttacaaggagtattgtaaattttactggcaattattattgtactattctaaatgtaagatttttacactttttcagaaataaa

SEQ ID NO: 168 - DNA, 60 bp, Homo sapiens
ctcccttgacgtttggcagatgaaaaacaactaagcctttttgaggtgtagagattctca

SEQ ID NO: 169 - DNA, 704 bp, Homo sapiens
gcagttactgagaactcataagacgaagctaaaatccctcttcggatccacagtcaaccgccctgaacacatcctgcaaaaagcccagagaaaggagcgccatggattactacagaaaatatgcagctatctttctggtcacattgtcggtgtttctgcatgttctccattccgctcctgatgtgcaggattgcccagaatgcacgctacaggaaaacccattcttctcccagccgggtgccccaatacttcagtgcatgggctgctgcttctctagagcatatcccactccactaaggtccaagaagacgatgttggtccaaaagaacgtcacctcagagtccacttgctgtgtagctaaatcatataacagggtcacagtaatggggggtttcaaagtggagaaccacacggcgtgccactgcagtacttgttattatcacaaatcttaaatgttttaccaagtgctgtcttgatgactgctgattttctggaatggaaaattaagttgtttagtgtttatggctttgtgagataaaactctccttttccttaccataccactttgacacgcttcaaggatatactgcagctttactgccttcctccttatcctacagtacaatcagcagtctagttcttttcatttggaatgaatacagcattaagcttgttccactgcaaataaagccttttaaatcatc

SEQ ID NO: 170 - DNA, 60 bp, Homo sapiens
tgagataaaactctccttttccttaccataccactttgacacgcttcaaggatatactgc

SEQ ID NO: 171 - DNA, 1707 bp, Homo sapiens
gggaagctccaggcaaacagcccagcaaacagcagcactcagctaaaaggaagactcacagaacacagttgaagaaggaaagtggcgatggacctcatcccaaatttggcggtggaaacctggcttctcctggctgtcagcctggtgctcctctatctatatgggacccgtacacatggactttttaagagactgggaattccagggcccacacctctgcctttgttgggaaatgttttgtcctatcgtcagggtctctggaaatttgacacagagtgctataaaaagtatggaaaaatgtggggaacgtatgaaggtcaactccctgtgctggccatcacagatcccgacgtgatcagaacagtgctagtgaaagaatgttattctgtcttcacaaatcgaaggtctttaggcccagtgggatttatgaaaagtgccatctctttagctgaggatgaagaatggaagagaatacggtcattgctgtctccaaccttcaccagcggaaaactcaaggagatgttccccatcattgcccagtatggagatgtattggtgagaaacttgaggcgggaagcagagaaaggcaagcctgtcaccttgaaagacatctttggggcctacagcatggatgtgattactggcacatcatttggagtgaacatcgactctctcaacaatccacaagacccctttgtggagagcactaagaagttcctaaaatttggtttcttagatccattatttctctcaataatactctttccattccttaccccagtttttgaagcattaaatgtctctctgtttccaaaagataccataaattttttaagtaaatctgtaaacagaatgaagaaaagtcgcctcaacgacaaacaaaagcaccgactagatttccttcagctgatgattgactcccagaattcgaaagaaactgagtcccacaaagctctgtctgatctggagctcgcagcccagtcaataatcttcatttttgctggctatgaaaccaccagcagtgttctttccttcactttatatgaactggccactcaccctgatgtccagcagaaactgcaaaaggagattgatgcagttttgcccaataaggcaccacctacctatgatgccgtggtacagatggagtaccttgacatggtggtgaatgaaacactcagattattcccagttgctattagacttgagaggacttgcaagaaagatgttgaaatcaatggggtattcattcccaaagggtcaatggtggtgattccaacttatgctcttcaccatgacccaaagtactggacagagcctgaggagttccgccctgaaaggttcagtaagaagaaggacagcatagatccttacatatacacaccctttggaactggacccagaaactgcattggcatgaggtttgctctcatgaacatgaaacttgctctaatcagagtccttcagaacttctccttcaaaccttgtaaagaaacacagatccccttgaaattagacacgcaaggacttcttcaaccagaaaaacccattgttctaaaggtggattcaagagatggaaccctaagtggagaatgagttattctaaggatttctactttggtcttcaagaaagctgtgccccagaacaccagagatttcaacttagtcaataaaaccttgaaataaagatgggcttaatctaatgta

SEQ ID NO: 172 - DNA, 60 bp, Homo sapiens
cacagatccccttgaaattagacacgcaaggacttcttcaaccagaaaaacccattgttc

SEQ ID NO: 173 - DNA, 60 bp, Homo sapiens
tcaacatcgagaggctttaaaacaactgtttagtggaaactttctgagagatggaaaaca

SEQ ID NO: 174 - DNA, 1143 bp, Homo sapiens
atggtgggctctggcctcctgtggctggccttggtctcctgcattctgacccaggcatctgcagtgcagcgagacccatccactgtggaggacaagtgtgagaaggcctgccgccccgaggaggagtgccttgccctcaacagcacctggggctgtttctgcagacaggacctcaatagttctgatgtccacagtttgcagcctcagctagactgtgggcccagggagatcaaggtgaaggtggacaaatgtttgctgggaggcctgggtttgggggaggaggtcattgcctacctgcgagacccaaactgcagcagcatcttgcagacagaggagaggaactgggtatctgtgaccagccccgtccaggctagtgcctgcaggaacattctggagagaaatcaaacccatgccatctacaaaaacaccctctccttggtcaatgatttcatcatcagagacaccatcctcaacatcaacttccaatgtgcctacccactggacatgaaagtcagcctccaagctgccttgcagcccattgtaagttccctgaacgtcagtgtggacgggaatggagagttcattgtcaggatggccctcttccaagaccagaactacacgaatccttacgaaggggatgcagttgaactgtctgttgagtccgtgctgtatgtgggtgccatcttggaacaaggggacacctcccggtttaacctggtgttgaggaactgctacgccacccccactgaagacaaggctgaccttgtgaagtatttcatcatcagaaacagctgctcaaatcagcgtgattccaccatccacgtggaggagaatgggcagtcctcggaaagccggttctcagttcagatgttcatgtttgctggacattatgacctagttttcctgcattgtgagattcatctctgtgattctcttaatgaacagtgccagccttcttgctcaagaagtcaagtccgcagtgaagtaccggccatcgacctagcccgggttctagatttggggcccatcactcggagaggtgcacagtctcccggtgtcatgaatggaacccctagcactgcagggttcctggtggcctggcctatggtcctcctgactgtcctcctggcttggctgttctga

SEQ ID NO: 175 - DNA, 60 bp, Homo sapiens
attcatctctgtgattctcttaatgaacagtgccagccttcttgctcaagaagtcaagtc

SEQ ID NO: 176 - DNA, 1097 bp, Homo sapiens
ggcacgagggatggtggacagcgtgtaccggacccgctccctgggggtggcggccgaagggctcccggaccagtacgcggacggggaggcggcgcgcgtgtggcagctgtatatcggagacacccgcagccgcaccgccgagtacaaggcatggctgcttgggctgctgcgccagcacggctgccagcgggtgctcgacgtagcctgtggcactggggtggactccattatgctggtggaagagggcttcagtgtgacgagtgtggatgccagtgacaagatgctgaagtatgcacttaaggagcgctggaaccggcggcacgagcccgccttcgacaagtgggtcatcgaagaagccaactggatgactctggacaaagatgtgccccagtcagcagagggtggctttgatgctgtcatctgccttggaaacagtttcgctcacttgccagactgcaaaggggaccagagtgagcaccggctggcgctgaaaaacattgcgagcatggtgcgggcagggggcctactggtcattgatcatcgcaactacgaccacatcctcagtacaggctgtgcacccccagggaagaacatctactataagagtgacttgaccaaggacgtcacaacatcagtgctgatagtgaacaacaaggcccacatggtgaccctggactatacggtgcaggtgccgggggctggccaggatggctctcctggcttgagtaagttccggctctcctactacccacactgtctggcatccttcacggagctgctccaagcagccttcggaggtaagtgccagcacagcgtcctgggcgacttcaagccttacaagccaggccaaacctacattccctgctacttcatccacgtgctcaagaggacagactgagtgtggcctcagctcccacaagcctctgcccaggcactgctaggctctgtctggaagatggggaccagcagccccacaccagggccagcctctagagcagactacagctggggtgcagggatgtgggttccacagacggaagggtaaacaatatagtctttttcagttcctgcaaaaaaaaaaaaaaaaaaaaaaaaaa

SEQ ID NO: 177 - DNA, 60 bp, Homo sapiens
tataagagtgacttgaccaaggacgtcacaacatcagtgctgatagtgaacaacaaggcc

SEQ ID NO: 178 - DNA, 2066 bp, Homo sapiens
atttctccatgtggcagacagagcaaagccacaacgctttctctgctggattaaagacggcccacagaccagaacttccactatactacttaaaattacataggtggcttgtcaaattcaattgattagtattgtaaaaggaaaaagaagttccttcttacagcttggattcaacggtccaaaacaaaaatgcagctgccattaaagtcacagatgaacaaacttctacactgatttttaaaatcaagaataagggcagcaagtttctggattcactgaatcaacagacacaaaaagctggcaatatagcaactatgaagagaaaagctactaataaaattaacccaacgcatagaagacttttttttctcttctaaaaacaactaagtaaagacttaaatttaaacacatcattttacaacctcatttcaaaatgaagacttttacctggaccctaggtgtgctattcttcctactagtggacactggacattgcagaggtggacaattcaaaattaaaaaaataaaccagagaagataccctcgtgccacagatggtaaagaggaagcaaagaaatgtgcatacacattcctggtacctgaacaaagaataacagggccaatctgtgtcaacaccaaggggcaagatgcaagtaccattaaagacatgatcaccaggatggaccttgaaaacctgaaggatgtgctctccaggcagaagcgggagatagatgttctgcaactggtggtggatgtagatggaaacattgtgaatgaggtaaagctgctgagaaaggaaagccgtaacatgaactctcgtgttactcaactctatatgcaattattacatgagattatccgtaagagggataattcacttgaactttcccaactggaaaacaaaatcctcaatgtcaccacagaaatgttgaagatggcaacaagatacagggaactagaggtgaaatacgcttccttgactgatcttgtcaataaccaatctgtgatgatcactttgttggaagaacagtgcttgaggatattttcccgacaagacacccatgtgtctcccccacttgtccaggtggtgccacaacatattcctaacagccaacagtatactcctggtctgctgggaggtaacgagattcagagggatccaggttatcccagagatttaatgccaccacctgatctggcaacttctcccaccaaaagccctttcaagataccaccggtaactttcatcaatgaaggaccattcaaagactgtcagcaagcaaaagaagctgggcattcggtcagtgggatttatatgattaaacctgaaaacagcaatggaccaatgcagttatggtgtgaaaacagtttggaccctgggggttggactgttattcagaaaagaacagacggctctgtcaacttcttcagaaattgggaaaattataagaaagggtttggaaacattgacggagaatactggcttggactggaaaatatctatatgcttagcaatcaagataattacaagttattgattgaattagaagactggagtgataaaaaagtctatgcagaatacagcagctttcgtctggaacctgaaagtgaattctatagactgcgcctgggaacttaccagggaaatgcaggggattctatgatgtggcataatggtaaacaattcaccacactggacagagataaagatatgtatgcaggaaactgcgcccactttcataaaggaggctggtggtacaatgcctgtgcacattctaacctaaatggagtatggtacagaggaggccattacagaagcaagcaccaagatggaattttctgggccgaatacagaggcgggtcatactccttaagagcagttcagatgatgatcaagcctattgactgaagagagacactcgccaatttaaatgacacagaactttgtacttttcagctcttaaaaatgtaaatgttacatgtatattacttggcacaatttatttctacacataaagtttttaaaatgaattttaccgtaactataaaagggaacctataaatgt

SEQ ID NO: 179 - DNA, 60 bp, Homo sapiens
attgattgaattagaagactggagtgataaaaaagtctatgcagaatacagcagctttcg

SEQ ID NO: 180 - DNA, 2080 bp, Homo sapiens
tcactgctgtgcagggcaggaaagctccacacacacagcccagcaaacagcagcacgctgctgaaaaaaagactcagaggagagagataaggaaggaaagtagtgatggatctcatcccaaacttggccgtggaaacctggcttctcctggctgtcagcctgatactcctctatctatatggaacccgtacacatggactttttaagaagcttggaattccagggcccacacctctgccttttttgggaaatgctttgtccttccgtaagggctattggacgtttgacatggaatgttataaaaagtatagaaaagtctggggtatttatgactgtcaacagcctatgctggctatcacagatcccgacatgatcaaaacagtgctagtgaaagaatgttattctgtcttcacaaaccggaggcctttcgggccagtgggatttatgaaaaatgccatctctatagctgaggatgaagaatggaagagaatacgatcattgctgtctccaacattcaccagcggaaaactcaaggagatggtccctatcattgcccagtatggagatgtgttggtgagaaatctgaggcgggaagcagagacaggcaagcctgtcaccttgaaacacgtctttggggcctacagcatggatgtgatcactagcacatcatttggagtgagcatcgactctctcaacaatccacaagacccctttgtggaaaacaccaagaagcttttaagatttaatccattagatccattcgttctctcaataaaagtctttccattccttaccccaattcttgaagcattaaatatcactgtgtttccaagaaaagttataagttttctaacaaaatctgtaaaacagataaaagaaggtcgcctcaaagagacacaaaagcaccgagtggatttccttcagctgatgattgactctcagaattcaaaagactctgagacccacaaagctctgtctgatctggagctcatggcccaatcaattatctttatttttgctggctatgaaaccacgagcagtgttctctccttcattatatatgaactggccactcaccctgatgtccagcagaaagtgcagaaggaaattgatacagttttacccaataaggcaccacccacctatgatactgtgctacagttggagtatcttgacatggtggtgaatgaaacactcagattattcccagttgctatgagacttgagagggtctgcaaaaaagatgttgaaatcaatgggatgtttattcccaaaggggtggtggtgatgattccaagctatgttcttcatcatgacccaaagtactggacagagcctgagaagttcctccctgaaaggttcagtaaaaagaacaaggacaacatagatccttacatatacacaccctttggaagtggacccagaaactgcattggcatgaggtttgctctcgtgaacatgaaacttgctctagtcagagtccttcagaacttctccttcaaaccttgtaaagaaacacagatccccctgaaattacgctttggaggacttcttctaacagaaaaacccattgttctaaaggctgagtcaagggatgagaccgtaagtggagcctgatttccctaaggacttctggtttgctctttaagaaagctgtgccccagaacaccagagacctcaaattactttacaaatagaaccctgaaatgaagacgggcttcatccaatgtgctgcataaataatcagggattctgtacgtgcattgtgctctctcatggtctgtatagagtgttatacttggtaatatagaggagatgaccaaatcagtgctggggaagtagatttggcttctctgcttctcataggactatctccaccacccccagttagcaccattaactcctcctgagctctgataacataattaacatttctcaataatttcaaccacaatcattaataaaaataggaattattttgatggctctaacagtgacatttatatcatgtgttatatctgtagtattctatagtaagctttatattaagcaaatcaataaaaacctctttacaaaagta

SEQ ID NO: 181 - DNA, 60 bp, Homo sapiens
ggatgagaccgtaagtggagcctgatttccctaaggacttctggtttgctctttaagaaa

SEQ ID NO: 182 - DNA, 1110 bp, Homo sapiens
gacagagcccgggccacggagctccttgccagctctcctcctcgcacagccgctcgaaccgcctgctgagccccatggcccgcgccacgctctccgccgcccccagcaatccccggctcctgcgggtggcgctgctgctcctgctcctggtggccgccagccggcgcgcagcaggagcgcccctggccactgaactgcgctgccagtgcttgcagaccctgcagggaattcacctcaagaacatccaaagtgtgaaggtgaagtcccccggaccccactgcgcccaaaccgaagtcatagccacactcaagaatgggcagaaagcttgtctcaaccccgcatcgcccatggttaagaaaatcatcgaaaagatgctgaaaaatggcaaatccaactgaccagaaggaaggaggaagcttattggtggctgttcctgaaggaggccctgccttacaggaacagaagaggaaagagagacacagctgcagaggccacctggcttgcgcctaatgtgtttgagcatacttaggagaagtcttctatttatttatttatttatttatttgtttgttttagaagattctatgttaatattttatgtgtaaaataaggttatgattgaatctacttgcacactctcccattatatttattgtttattttaggtcaaacccaagttagttcaatcctgattcatatttaatttgaagatagaaggtttgcagatattctctagtcatttgttaatatttcttcgtgatgacatatcacatgtcagccactgtgatagaggctgaggaatccaagaaaatggccagtaagatcaatgtgacggcagggaaatgtatgtgtgtctattttgtaactgtaaagatgaatgtcagttgttatttattgaaatgatttcacagtgtgtggtcaacatttctcatgttgaagctttaagaactaaaatgttctaaatatcccttggcattttatgtctttcttgtaagatactgccttgtttaatgttaattatgcagtgtttccctctgtgttagagcagagaggtttcgatatttattgatgttttcacaaagaacaggaaaataaaatatttaaaaatat

SEQ ID NO: 183 - DNA, 60 bp, Homo sapiens
ttccctctgtgttagagcagagaggtttcgatatttattgatgttttcacaaagaacagg

SEQ ID NO: 184 - DNA, 938 bp, Homo sapiens
caagagagagagagaggtgcaagccccaaagcgagcgacatgtccctttggggagcagtccctctgcaccccagagtgaggaggacgcaggggtcagaggtggctacagggcaggcagaggaggcacctgtagggggtggtgggctggtggcccaggagaagtcaggaagggagcccagctggtgacaagagagcccagaggtgcctggggctgagtgtgagagcccggaagatttcagccatgcctcacagctccgacagcagtgactccagcttcagccgctctcctccccctggcaaacaggactcatctgatgatgtgagaagagttcagaggagggagaaaaatcgtattgccgcccagaagagccgacagaggcagacacagaaggccgacaccctgcacctggagagcgaagacctggagaaacagaacgcggctctacgcaaggagatcaagcagctcacagaggaactgaagtacttcacgtcggtgctgaacagccacgagcccctgtgctcggtgctggccgccagcacgccctcgccccccgaggtggtgtacagcgcccacgcattccaccaacctcatgtcagctccccgcgcttccagccctgagcttccgatgcggggagagcagagcctcgggaggggcacacagactgtggcagagctgcgcccatcccgcagaggcccctgtccacctggagacccggagacagaggcctggacaaggagtgaacacgggaactgtcacgactggaagggcgtgaggcctcccagcagtgccgcagcgtttcgaggggcgtgtgctggaccccaccactgtgggttgcaggcccaatgcagaagagtattaagaaagatgctcaagtcccatggcacagagcaaggcgggcagggaacggttatttttctaaataaatgctttaaaaga

SEQ ID NO: 185 - DNA, 60 bp, Homo sapiens
gcaggcccaatgcagaagagtattaagaaagatgctcaagtcccatggcacagagcaagg

SEQ ID NO: 186 - DNA, 2624 bp, Homo sapiens
catccttctagaagctaaattctttcattgccttgagacatcactagattttgaagcacttgcaaactagaagcttgcaagatcaatgtccatgtatatttttaaagatatgcatgctttaaaaggaccctaatttctgagtacatggcttccccaaagaaacagtatatattctggagatgatgggggttttggcatggagagggactcctgtctagtctagaaaatgttacttacatgcctcttccatgtaccgatctcaagaatatgggttttctagtttggctttaaacactacccaggcaggaaggtggctttggtaagaattttgagctggatgaaatgttctagtgaacttacgactgtgtatgtgcgcacgcgtgtgtgtgtgtgtgtgtgtgtgtgtgtgtgtgtgtgaagaaacagcaaaaggggaagtgggagaaacagtaaggaagcgtttttaattaaaaatatgtatacctaagaggagactttattttctatttctggtggtggtgatctatgttctggaatccatttaccagaagtttgtggatcttttgtttgaagtggaattgttcagtgccctactctctttgacggtgcagagccttgcggcaaagtgttctcctgggccctagagacccccagggcacctggcaggagcccgtaaaccacggcagagtcccaagtggtgcatgttttggcgagtgatgggcaggactgatgattcacagctgtgaggctgtgctattgtttttaccctcttgtactgcttttaataggaagtcccgactttacgtcagttgtgagagcagcgtcttatgatgtgacaggcaagaagacattccttgcatcaaatataagagtttaatgagaagagtggagtggataagtgaactctcccaagagtactgttttttgtttccctttttaaatgctttcttggtacataaataatataatactttttttaaagaaattccagatgagtgggaaaaaaaccaatcacctgttattacactatctgattataaccactgttaacatttcagtttttatcttttcagacttttttctatgcatctgtgtgtgttttattactttttccatgaaatataatcatattatacatactgttttataacttttatcccttttaatgctatattgtgaatagatttctatatcagtaaatatgtaattacattatttttaacctctatgtaggttgtaccttggatacttaggttgtttccaattttttttactgttgtagtcaaggacataatgaagttcttctaacatccttgcgaacttttcagaatattgacttagggtaattttctgaagttatcactggctcaaaagtacgcgcctccctatctgcggctcctttccttctgaggcatacaggacttcaccctccatcccccttgtactcattcagggtcctatgactaattctggccaatgaaatgtgagcacaggtgacacatgaagctccagacagacactgaaatgcccatgagcagttccgcagtgtctgccttcccttccctcagcaaatgctgatgtcccagggacagagcctctgtcaagcctggatccctgagtgactacgtggagcagcccccttctcccttcatgttaccctcacctgccaccctgcatggacgggtagcatgaataaaaaaaataaaccttaggtgttaaacactggggtttcagggttaattggttaactgcagcataacatatcctgttgcaacaataaaaaagaatgcacatttttaggacttgtaatatgtattgcctcaaattgccttccagaaagacagacccaattatactcccacccacagtgtgtgagtgtgtactgcttcctctttaacactggagttaccctggggacagagagctaaaaaaaaaatatttttttggttaaaatgtaaccctttaaggtgttcagcagtatcattgatttctaagaggtttatttcataaactttattatttctttctaaacagttaaatctgtgatctggctgggcgtgttggctcttgcctgtgatcccaacactttgggtcgccaaggtggaaggatcgcttgagtccaggcatttgaggttgcagtgagctttgatggcaccggtgcactccagcctggggaacagagcaagaccctgtctctaaaaaaaattttaaaaacctctgatctatctggaatgtattttctaaattaccccaacactgtttattgggaagtctgtcctttattctatatgaaatcccatttttgccatacacctagtagcccttctgttgggtgccaggataagcaccctggccttgagtgtgctgtgaactctttattatgggttgtgatcttcctgcacattctagcactggtaccacattgtttggatcgccatagctttggactaaacttccccattaaactttttcaaaacttgcctagtatattgtgcaggccgggcacggtggctcgcgcctgtggtcccagcactttgggaggccaaggtggatggatcgcctgagatcaggagttcgagaccagcctggacaacatggcgaaaccccatctctactaaaaatac

SEQ ID NO: 187 - DNA, 60 bp, Homo sapiens
tataaatttgactcttagtgtaaaataatcttaatatttgaattatacattcaggttatg

SEQ ID NO: 188 - DNA, 4604 bp, Homo sapiens
ggaacagcttgtccacccgccggccggaccagaagcctttgggtctgaagtgtctgtgagacctcacagaagagcacccctgggctccacttacctgccccctgctccttcagggatggaggcaatggcggccagcacttccctgcctgaccctggagactttgaccggaacgtgccccggatctgtggggtgtgtggagaccgagccactggctttcacttcaatgctatgacctgtgaaggctgcaaaggcttcttcaggcgaagcatgaagcggaaggcactattcacctgccccttcaacggggactgccgcatcaccaaggacaaccgacgccactgccaggcctgccggctcaaacgctgtgtggacatcggcatgatgaaggagttcattctgacagatgaggaagtgcagaggaagcgggagatgatcctgaagcggaaggaggaggaggccttgaaggacagtctgcggcccaagctgtctgaggagcagcagcgcatcattgccatactgctggacgcccaccataagacctacgaccccacctactccgacttctgccagttccggcctccagttcgtgtgaatgatggtggagggagccatccttccaggcccaactccagacacactcccagcttctctggggactcctcctcctcctgctcagatcactgtatcacctcttcagacatgatggactcgtccagcttctccaatctggatctgagtgaagaagattcagatgacccttctgtgaccctagagctgtcccagctctccatgctgccccacctggctgacctggtcagttacagcatccaaaaggtcattggctttgctaagatgataccaggattcagagacctcacctctgaggaccagatcgtactgctgaagtcaagtgccattgaggtcatcatgttgcgctccaatgagtccttcaccatggacgacatgtcctggacctgtggcaaccaagactacaagtaccgcgtcagtgacgtgaccaaagccggacacagcctggagctgattgagcccctcatcaagttccaggtgggactgaagaagctgaacttgcatgaggaggagcatgtcctgctcatggccatctgcatcgtctccccagatcgtcctggggtgcaggacgccgcgctgattgaggccatccaggaccgcctgtccaacacactgcagacgtacatccgctgccgccacccgcccccgggcagccacctgctctatgccaagatgatccagaagctagccgacctgcgcagcctcaatgaggagcactccaagcagtaccgctgcctctccttccagcctgagtgcagcatgaagctaacgccccttgtgctcgaagtgtttggcaatgagatctcctgactaggacagcctgtgcggtgcctgggtggggctgctcctccagggccacgtgccaggcccggggctggcggctactcagcagccctcctcacccgtctggggttcagcccctcctctgccacctcccctatccacccagcccattctctctcctgtccaacctaacccctttcctgcgggcttttccccggtcccttgagacctcagccatgaggagttgctgtttgtttgacaaagaaacccaagtgggggcagagggcagaggctggaggcaggccttgcccagagatgcctccaccgctgcctaagtggctgctgactgatgttgagggaacagacaggagaaatgcatccattcctcagggacagagacacctgcacctccccccactgcaggccccgcttgtccagcgcctagtggggtctccctctcctgccttactcacgataaataatcggcccacagctcccaccccacccccttcagtgcccaccaacatcccattgccctggttatattctcacgggcagtagctgtggtgaggtgggttttcttcccatcactggagcaccaggcacgaacccacctgctgagagacccaaggaggaaaaacagacaaaaacagcctcacagaagaatatgacagctgtccctgtcaccaagctcacagttcctcgccctgggtctaaggggttggttgaggtggaagccctccttccacggatccatgtagcaggactgaattgtccccagtttgcagaaaagcacctgccgacctcgtcctccccctgccagtgccttacctcctgcccaggagagccagccctccctgtcctcctcggatcaccgagagtagccgagagcctgctcccccaccccctccccaggggagagggtctggagaagcagtgagccgcatcttctccatctggcagggtgggatggaggagaagaattttcagaccccagcggctgagtcatgatctccctgccgcctcaatgtggttgcaaggccgctgttcaccacagggctaagagctaggctgccgcaccccagagtgtgggaagggagagcggggcagtctcgggtggctagtcagagagagtgtttgggggttccgtgatgtagggtaaggtgccttcttattctcactccaccacccaaaagtcaaaaggtgcctgtgaggcaggggcggagtgatacaacttcaagtgcatgctctctgcaggtcgagcccagcccagctggtgggaagcgtctgtccgtttactccaaggtgggtctttgtgagagtgagctgtaggtgtgcgggaccggtacagaaaggcgttcttcgaggtggatcacagaggcttcttcagatcaatgcttgagtttggaatcggccgcattccctgagtcaccaggaatgttaaagtcagtgggaacgtgactgccccaactcctggaagctgtgtccttgcacctgcatccgtagttccctgaaaacccagagaggaatcagacttcacactgcaagagccttggtgtccacctggccccatgtctctcagaattcttcaggtggaaaaacatctgaaagccacgttccttactgcagaatagcatatatatcgcttaatcttaaatttattagatatgagttgttttcagactcagactccatttgtattatagtctaatatacagggtagcaggtaccactgatttggagatatttatggggggagaacttacattgtgaaacttctgtacattaattattattgctgttgttattttacaagggtctagggagagacccttgtttgattttagctgcagaactgtattggtccagcttgctcttcagtgggagaaaaacacttgtaagttgctaaacgagtcaatcccctcattcaggaaaactgacagaggagggcgtgactcacccaagccatatataactagctagaagtgggccaggacaggccgggcgcggtggctcacgcctgtaatcccagcagtttgggaggtcgaggtaggtggatcacctgaggtcgggagttcgagaccaacctgaccaacatggagaaaccctgtctctattaaaaatacaaaaaaaaaaaaaaaaaaaaatagccgggcatggtggcgcaagcctgtaatcccagctactcaggaggctgaggcagaagaattgaacccaggaggtggaggttgcagtgagctgagatcgtgccgttactctccaacctggacaacaagagcgaaactccgtcttagaagtggaccaggacaggaccagattttggagtcatggtccggtgtccttttcactacaccatgtttgagctcagacccccactctcattccccaggtggctgacccagtccctgggggaagccctggatttcagaaagagccaagtctggatctgggaccctttccttccttccctggcttgtaactccaccaagcccatcagaaggagaaggaaggagactcacctctgcctcaatgtgaatcagaccctaccccaccacgatgtgccctggctgctgggctctccacctcaggccttggataatgctgttgcctcatctataacatgcatttgtctttgtaatgtcaccaccttcccagctctccctctggccctgcttcttcggggaactcctgaaatatcagttactcagccctgggccccaccacctaggccactcctccaaaggaagtctaggagctgggaggaaaagaaaagaggggaaaatgagtttttatggggctgaacggggagaaaaggtcatcatcgattctactttagaatgagagtgtgaaatagacatttgtaaatgtaaaacttttaaggtatatcattataactgaaggagaaggtgccccaaaatgcaagattttccacaagattcccagagacaggaaaatcctctggctggctaactggaagcatgtaggagaatccaagcgaggtcaacagagaaggcaggaatgtgtggcagatttagtgaaagctagagatatggcagcgaaaggatgtaaacagtgcctgctgaatgatttccaaagagaaaaaaagtttgccagaagtttgtcaagtcaaccaatgtagaaagctttgcttatggtaataaaaatggctcatacttatatagcacttactttgtttgcaagtactgctgtaaataaatgctttatgcaaacc

SEQ ID NO: 189 - DNA, 60 bp, Homo sapiens
ttgccagaagtttgtcaagtcaaccaatgtagaaagctttgcttatggtaataaaaatgg

SEQ ID NO: 190 - DNA, 1182 bp, Homo sapiens
gaattccgctagactaagttggtcatgatgcagaagctactcaaatgcagtcggcttgtcctggctcttgccctcatcctggttctggaatcctcagttcaaggttatcctacgcagagagccaggtaccaatgggtgcgctgcaatccagacagtaattctgcaaactgccttgaagaaaaaggaccaatgttcgaactacttccaggtgaatccaacaagatcccccgtctgaggactgacctttttccaaagacgagaatccaggacttgaatcgtatcttcccactttctgaggactactctggatcaggcttcggctccggctccggctctggatcaggatctgggagtggcttcctaacggaaatggaacaggattaccaactagtagacgaaagtgatgctttccatgacaaccttaggtctcttgacaggaatctgccctcagacagccaggacttgggtcaacatggattagaagaggattttatgttataaaagaggattttcccaccttgacaccaggcaatgtagttagcatattttatgtaccatggttatatgattaatcttgggacaaagaattttatagaaatttttaaacatctgaaaaagaagcttaagttttatcatccttttttttctcatgaattcttaaaggattatgctttaatgctgttatctatcttattgttcttgaaaatacctgcattttttggtatcatgttcaaccaacatcattatgaaattaattagattcccatggccataaaatggctttaaagaatatatatatatttttaaagtagcttgagaagcaaattggcaggtaatatttcatacctaaattaagactctgacttggattgtgaattataatgatatgccccttttcttataaaaacaaaaaaaaaataatgaaacacagtgaatttgtagagtgggggtatttgacatattttacagggtggagtgtactatatactattacctttgaatgtgtttgcagagctagtggatgtgtttgtctacaagtatgattgctgttacataacaccccaaattaactcccaaattaaaacacagttgtgctgtcaatacctcatactgctttacctttttttcctggatatctgtgtattttcaaatgttactatatattaaagcagaaatataacc

SEQ ID NO: 191 - DNA, 60 bp, Homo sapiens
agtagcttgagaagcaaattggcaggtaatatttcatacctaaattaagactctgacttg

SEQ ID NO: 192 - DNA, 60 bp, Homo sapiens
aataatgctaccaggatgctaaagatgatgatgttaacccattccagtacagtattcttt

SEQ ID NO: 193 - DNA, 396 bp, Homo sapiens
attcagatctatataaattaaccttagcattattcctgtgctttattattcactgataggttcttattcaactaatgtttatttcttgcctaatatgtgccagaaaccgtgaagtgtttaggatatgcagtgagtggttaatgagacaagtatgatccaacttgtgtttgcaattaagcagggatacaggtactgaataaatactgaaaataattaaaatggtaataagtgatttgttaatactgatgcatgtagatctaattcattttaaatgttacaaaataagttacaaaatggtatatgccatatgatgctatttttgtacatctataataaactttatgagacacaaatatgcaatgtagttactaataaaactataagaacaagaacacc

SEQ ID NO: 194 - DNA, 60 bp, Homo sapiens
ggttaatgagacaagtatgatccaacttgtgtttgcaattaagcagggatacaggtactg

SEQ ID NO: 195 - DNA, 4083 bp, Homo sapiens
tcttcccatccacccgccgcttctttcctccatctagcgatttttattttttaagtgtctcttcctttttctttcttttcttttttattttttatatatattttttggcattgctttgcagatgttgggatgagagtcggagccgaataccaagctcggatccctgaatttgatccaggtgctacaaagtacacagataaagacaatggagggatgcttgtatggtctccatatcacagtatcccagatgccaaattggatgaatacattgcaattgcaaaggaaaagcatggctacaatgtggaacaggcacttggcatgttgttctggcataaacataacattgagaagtcccttgctgatctccctaatttcactccctttccggatgagtggacagtggaagataaagtcctatttgaacaagcctttagttttcatggaaagagctttcacaggattcagcaaatgcttccagataagacaattgcaagccttgtaaaatattactattcttggaaaaaaactcgctctaggacaagtttgatggatcgccaggctcgtaaactagctaatagacataatcagggtgacagtgatgatgatgtagaagaaacacatccaatggatgggaatgatagtgattatgatcccaaaaaagaagccaaaaaagagggtaatactgaacaacctgtccaaactagcaagattggacttggaagaagagagtatcagagtttacaacatcgccatcattctcagcgttctaagtgccgtccacctaagggcatgtatttaacccaggaagatgtggtagcagtttcctgtagtcccaatgcagccaacaccatcctgaggcaactggacatggagttgatctctctaaaacgtcaggttcagaatgctaagcaagtaaacagtgcacttaaacagaaaatggaaggtggaattgaagaattcaaacctcctgagtcaaatcagaaaattaatgcccgttggaccacagaggagcagcttctagcagtgcaaggtgtccgcaaatatggtaaagattttcaagctattgcagatgtaattggcaacaagactgttggccaagtgaagaacttctttgtaaactacaggcgtcggtttaacttagaggaggtattgcaggagtgggaagcagaacaaggaacccaggcttctaatggtgatgcttctactttaggggaggagacaaaaagtgcttctaatgtgccatcagggaagagcactgatgaagaagaggaggcacagaccccacaggctcctcggacactgggtccatcacctcctgccccatcatccactccaacaccaacagcccctattgccactctgaaccagcctccaccacttcttcgtccaacactgcctgctgccccggctcttcaccggcagcctcctccactccagcagcaggctcggttcatccagccccggccaactttaaatcagcctccaccacctcttattcgccctgctaattccatgccaccccgtctaaacccaagaccggtgttgtccacggttggtggtcaacagccaccatcacttattggaattcagacagattcacagtcctcactgcactaaaaattaaattggacacagctgcagtaacttttcaccccatcattataccagtgctcatctgactgatgaaaaagaggaaagaataatcatttctagatactgaggctgcgaactagttctgtggcagtggactagcataagtggatgtctaagaaatttttcagttcactagactaaaatgttttacaacaaaaagcctccagttagcctcctttctagagtatatgttcagcaatgtgatctcataaaaggaaaaacaaaagatttaagtattctatataccaagtttttgttttgtttttactgtatttattttattgaggttctttatattcctgcctcttcatagtcaaggctcttagtacaggaatattgacttaggaattgtgaaaactccttaagtttcttaagttaaggatgtttggcttttttctttaattttttaaaaaccattttcctatgttaggagtgcaagaatagccagcatttccgattttgacatatgttcattttatgcatatttaagaaattatagctgcatatcccttctttcaaaaaatgttgcttttttttttaaaggaattttaatatattcctttaaaagaaagcaatttaatcaattgcaaagcaattatataaaaccacaaagaatgtactgaacctactaaccctttaacatacagtttagggtcctagcgcagagtccttgtttaaaggtcattgactcatcatctgtcagtaatgagaggattggaagaataattttgcatacaaatgaggacttaatttgttgaaatataatctctttaagttccttgaaaatggagttggttttttttgtttctaaatgctatctgcttttaactagtagttgcctacatctggggacttcagagaagaattatattttgttagttaagtagacacagtggttatggaagcatttctttacagtaccctttacgtgtttggtttctgaacttaaaattgccctcatacttaataatatggtctgcatttaatatgaaaggtgttttattgataaatctattgtactatttggatacatttgtgtattccttgcagccaacctgtattcgtgggattggtgtagggttaaatcatcaacattatttcataaaataagaatttgttctgtgttatctaaagatgtatcagtatattgtcacagttgtgctgttaactaaaaatgctgagacccctttttatagaaaaacaaaaagacatcaagtcttcttaattcaacccataatcattaagtacttaacaaagaatattttacaagtgatagtatttcaacaatgtgtaattaatatttttgatacagtgatttcatattggaatcattatttgtgcaaagggacagacagatcacttagattgctatactagtggacataggctaaatgtttgcacattcacattcttatcacgtgtagaatacttcacaaaatagtcaacatctaaggccctaatttatgttttgaaagatcatgtgttcccaaagtattccctattgttggctccacagccttaaagtgctatagatttaaattcattgattagttttaatttttaattttagactgtgtatttccataaataccctacgtactggcatatttgaaactctttttccaggttaggtccttttctttctcattgaatcatcttaaatagttcttggccctgaatttagctgatttaaaattcttaatattcaagaatttatacttattttttccttaaaagccacaggggacagttaaatatcttaaaatatctaaaacattttttaaagcacttagattgtcttacgtatgtgcatactatacctttacagcgtttattgtcttgtctcttgtcagtagaccttcagtacacagtatgtgggatatgtcagtcaagttggtcagcaccagcatctgtccagctgttcagtatattgtgattcattaaaaaatctcttctatcccagacatgggccaaggtgctgtatctgagggatgtgctgtaatttgatttacatgcattagagcacacagtagaaaaacgttagcttcattagtaatatgacacatgtatatagtgagatgtctttattgtgtgctttgcatattttgtaaatattttgcacgtcattatttttcttttttgtttaagcagtgtttggcctggaagagtgatatgcttgctgcttaatcaaaggattaaagatttaaagatgtctatgtcttctatttttatataatttcatgttctatgaggaatttagtacctcttcactgtgaaattcgaaataatgatttttataaaagcaaaactagaaatcttttaatgacaattttcattaatttcagggttatcatttttgagaaatctacaccaaagtggttttttaaaattacataactaaaaataaaccacactgtggatacatcttat

SEQ ID NO: 196 - DNA, 60 bp, Homo sapiens
cataatattgcgtttgtgtcagacattggatttctatgttagatattaaagagcttactt

SEQ ID NO: 197 - DNA, 396 bp, Homo sapiens
actccgccttccacgtgcacccactgcctcttcccttctcgcttgggaactctagtctcgcctcgggttgcaatggaccccaactgctcctgtgccgctggtgtctcctgcacctgcgccagctcctgcaagtgcaaagagtgcaaatgcacctcctgcaagaagagctgctgctcctgctgccctgtgggctgtgccaagtgtgcccaaggctgcatctgcaaaggggcatcggagaagtgcagctgctgcgcctgatgtcgggacagccctgctcccaagtacaaatagagtgacccgtaaaatctaggattttttgttttttgctacaatcttgacccctttgctacattcccttttttctgtgaaatatgtgaataataattaaacacttag

SEQ ID NO: 198 - DNA, 60 bp, Homo sapiens
ctcccaagtacaaatagagtgacccgtaaaatctaggattttttgttttttgctacaatc

SEQ ID NO: 199 - DNA, 367 bp, Homo sapiens
ctccagtctcacctcggcttgcaatggaccccaactgctcctgcgaggctggtggctcctgcgcctgcgccggctcctgcaagtgcaaaaagtgcaaatgcacctcctgcaagaagagctgctgctcctgttgccccctgggctgtgccaagtgtgcccagggctgcatctgcaaaggggcgtcagagaagtgcagctgctgtgcctgatgtcgggacagccctgctgtcagatgaaaacagaatgacacgtaaaatccgaggttttttttttctacaactccgactcatttgctacattcctttttttctgtgaaatatgtgaataataattaaacacttagacttgaaaaaaaaaaaaaaaaaaa

SEQ ID NO: 200 - DNA, 60 bp, Homo sapiens
tgatgtcgggacagccctgctgtcagatgaaaacagaatgacacgtaaaatccgaggttt

SEQ ID NO: 201 - DNA, 711 bp, Homo sapiens
tggggttccaggcgggcagcagctgcaggctgaccttgcagcttggcggaatggactggcctcacaacctgctgtttcttcttaccatttccatcttcctggggctgggccagcccaggagccccaaaagcaagaggaaggggcaagggcggcctgggcccctggcccctggccctcaccaggtgccactggacctggtgtcacggatgaaaccgtatgcccgcatggaggagtatgagaggaacatcgaggagatggtggcccagctgaggaacagctcagagctggcccagagaaagtgtgaggtcaacttgcagctgtggatgtccaacaagaggagcctgtctccctggggctacagcatcaaccacgaccccagccgtatccccgtggacctgccggaggcacggtgcctgtgtctgggctgtgtgaaccccttcaccatgcaggaggaccgcagcatggtgagcgtgccggtgttcagccaggttcctgtgcgccgccgcctctgcccgccaccgccccgcacagggccttgccgccagcgcgcagtcatggagaccatcgctgtgggctgcacctgcatcttctgaatcacctggcccagaagccaggccagcagcccgagaccatcctccttgcacctttgtgccaagaaaggcctatgaaaagtaaacactgacttttgaaagcaaaaaaaaaaaaaaaaaa

SEQ ID NO: 202 - DNA, 60 bp, Homo sapiens
cttgcacctttgtgccaagaaaggcctatgaaaagtaaacactgacttttgaaagccaga

SEQ ID NO: 203 - DNA, 4303 bp, Homo sapiens
acacaagctcaggagtagctgccatgcacatcagtgtccattaaaatgacttgtagcaaatctctacgttcaaagtctaactttgacagacaaccttacttccagcgaagtctactcccctccctccggagggaagaatgggctgcggttaagcgtttgccctggtgtcagggccaactgcttcgaagcgccagactttcggagactgtgggtggggagcattaagcgggaaatgaccttcacatttcagtcagaggacttaaaacgtgactgtggtaaaaaaatgtctcatcaacacgtgttttccttggccatggaggaagatgtgaaaacagcagacaccaaaaaagccagccggatccttgaccatgaaaaagaaaacactcgctccatctgtctccttgagcaaaaaagaaaagttgtttcctccaacattgatgttcctccagcaaggaaatcttcagaggaactagacatggacaaggtgacagcagcaatggtactaaccagcttgtcgactagccctttggttcgaagtcctcccgtgcggccgaacgagagcctcagcggatcctggaaggagggcggctgcgtgccttccagcaccagcagcagcggctactggagctggagcgcccccagcgaccagtccaacccgtccacgccgtcgccgccgctctcggctgacagcttcaagcccttccgcagccccgcgcagccagacgacggcatcgacgaggcggaggccagcaacctgctcttcgacgagcccattcccaggaaaagaaagaattccatgaaggtgatgttcaaatgcctctggaaaaactgtgggaaggtgctgagcactgcagcaggtatccagaaacacatccgaaccatccatctggggcgcgttggagactctgactacagtgatggagaagaggacttttactacactgagatcaagctcaacacagactcagtggcagacgggctgagcagcctggccccggtctcaccttcccagtccctggcttcacctcctactttccccatcccagattcaagccgaacagaaactccttgtgccaaaacggagactaagttgatgacgccgttgagccgctcagctcccaccaccctctacctcgtgcacactgaccatgcttaccaggccacaccccctgtgaccattccaggatcggccaagttcacccccaatggcagcagcttcagcatttcctggcaatctcctccggtcactttcacaggcatcccagtgtcacccacacatcatccggtgggcacaggagagcagagacagcatgcgcacacggtcctgtcctccccacccagaggcacagtcagcttaaggaagcccaggggagagggcaaaaagtgtcggaaggtgtacgggatggagaaccgagacatgtggtgtaccgcctgccgctggaagaaggcctgccagaggttcctcgactgagagacccccaggcagaggggctcagggccctgagccgctcctgccctggcctgccactgcaggtgttggaaagagcttttcctactgaataaaacacagttgaagccaggaaaagccctttcaggaaccttggaggaataacagcaaaaacacagaaaaattgtttaagtcaccacctatgacaaaagaaagttgctcttactgagaacccagcttggagcagctataactagttttttttccttcaaaagaaaagtcaactttttttgctgtatgtctagacttaaaactgtggacttctgtagcaattgaaccaacaaagcccattttacctagaaaggaggcatattttgataagctttctgaattatgccattttcaagatttttttgacacttaaaaaacaagctacaggttattcagtagcatttgtacaaagatcaatacttacttttgttgtgaataatcttttccgtatcttccatttgacttcttggagcagtatatgtcaggatgtgttgcaagacagcgcagcactctgggcatcttttctatggctttttgtttgtttttcttttaagaatggccccacactgaaccatggtagagctattagtttgtagggccccagatggcataaactcgagaagggattgtccacggaaatcaccagcagacttcagcccgaagctgagttcaggaagtccagctgtcactgttgggaaacatctaggagtcttccttggatccataagaagctcttcccctaaaggcagcacagctaactctactctctacctgccacaactcagtcaagaattggcacctgtagccatctgggtaagcctcgatgcttctttcagggatgtgacacaaatggcaactcggagctatttgttactgcttgtctgtcaagattgtagccaggttaatgggtcattttccttctctccagactccaccactgactgatttcagaagaggtagagaactccaaactgtcccagcaggtttgctttagacaacagagcacagcccacatggccctacctgttcagaaagtcatgttagatcaacaaaccacttccattctgagtgcacttttataggttttatgctttagcatgtccgggagatgagttaattaacaatataaacattatgtgagtaaatggaaggtccaaactttaagtttttcttataaaaatattggagctattcatttaagaatttgctcaaaagggaacataacgccaaaaggaaaatgcatgtaggtataggaatttctcagtttagtagggccagggcttgcactatgttccatttattgggcttcgtaacttacttgcttgtttgtttgggggatagtggtgtggggagaggggagtcgtcaagccctataaataagctcattctctatctacccgactctcaattgccctgctaaagagttatttctcctatacctatgcaaagtaggaagagcaccttataggaggcactgtatagggacaggggacatgggatcagccataggaatgttaaatgaaattgcacagaggaaagtttaatatatgtctagagattatacatacacttttttaagcgtaaaaagaagacatctagtaatgacagatattctttttatatacaagcaaaagaaagtataaggaggttctacagtgcaacatccacaatctgtgcattcacatattatgggacttttattttttaaactctcatataaattttttaaaattactccttggaagagatcctggtttttttcttcatttatttttttctttaaaaacatttattttaagagaagagaaaaagagcttcatctaattttgcatcttgattaccaatcagtactagtcacagcaccagcaatactgtatgttttagactgacaaggtcagccaggaaatggcatttttttaaacgcagaaatgtgtttgtttcctctactctaacacgtcctttctcctcctggtgtcctgtcaccccccatgcagcaccactgatgcgagatgatgctctggcctggtccaggaagccctgagccatgggcagattgcccagtggccttgggcggccagagcttgtcacctgtttaaacaagttcaccatgtgtttaaatgacagggcacagtcctggaccagaggtttttctcttcagcaaagctccctggcccttgatcgttggactgttactaatagaaaaagattcaagtcatgaagtataaaatccatcccccatcccagaactttgaaacacaaggagggagagatctttgctatggagcagtcctggagcaaagccccgtggcttccacccccagatatataccccataagtagtgctgagctccagcttagctgagccaagctcagtccttatctggtgttcagccagtgcacaggtataagcagaactacagagctgaatgtagcttccctgggatctcttctcctttctaaagcatttttcacacagttctgtacctcctacccaagttggggctgctttctgcctgctagcccacggctctgtgtactttcttttctggcttcaggtgcagacagaccctcagtaccttcctggacacagacacatattccctggaccaaggcgtggaataactagtagaccaccaagccacaggtggctggtcttgaagaaaagggattatactccttacaggccacccagaaagctatgaattccaatatacaccactgatcgtgcaagttagggttttttttttttaaacgtagcattattttgttatattttggaactaaatgaagtgccaaattaaccag

SEQ ID NO: 204 - DNA, 60 bp, Homo sapiens
ctgcccgaacataaccatattgcagatgaaaattttcaatagagaatgacacaattcttg

SEQ ID NO: 205 - DNA, 2514 bp, Homo sapiens
ggcacgagggctgagcgccggaggagcgtaggcagggcagcgctggcgccagcggcgacaggagccgcgcgaccggcaaaaatacacgggaggccgtcgccgaaaagagtccgcggtcctctctcgtaaacacactctcctccaccggcgcctccccctccgctctgcgcgccgcccggctgggcgcccgaggccgctccgactgctatgtgaccgcgaggctgcgggaggaaggggacagggaagaagaggctctcccgcgggagcccttgaggaccaagtttgcggccacttctgcaggcgtcccttcttagctctcgcctgcccctttctgcagcctaggcggcccaggttctcttctcttcctcgcgcgcccagccgcctcggttcccggcgaccatggtgacgatggaggagctgcgggagatggactgcagtgtgctcaaaaggctgatgaaccgggacgagaatggcggcggcgcgggcggcagcggcagccacggcaccctggggctgccgagcggcggcaagtgcctgctgctggactgcagaccgttcctggcgcacagcgcgggctacatcctaggttcggtcaacgtgcgctgtaacaccatcgtgcggcggcgggctaagggctccgtgagcctggagcagatcctgcccgccgaggaggaggtacgcgcccgcttgcgctccggcctctactcggcggtcatcgtctacgacgagcgcagcccgcgcgccgagagcctccgcgaggacagcaccgtgtcgctggtggtgcaggcgctgcgccgcaacgccgagcgcaccgacatctgcctgctcaaaggcggctatgagaggttttcctccgagtacccagaattctgttctaaaaccaaggccctggcagccatcccacccccggttccccccagcgccacagagcccttggacctgggctgcagctcctgtgggaccccactacacgaccaggggggtcctgtggagatccttcccttcctctacctcggcagtgcctaccatgctgcccggagagacatgctggacgccctgggcatcacggctctgttgaatgtctcctcggactgcccaaaccactttgaaggacactatcagtacaagtgcatcccagtggaagataaccacaaggccgacatcagctcctggttcatggaagccatagagtacatcgatgccgtgaaggactgccgtgggcgcgtgctggtgcactgccaggcgggcatctcgcggtcggccaccatctgcctggcctacctgatgatgaagaaacgggtgaggctggaggaggccttcgagttcgttaagcagcgccgcagcatcatctcgcccaacttcagcttcatggggcagctgctgcagttcgagtcccaggtgctggccacgtcctgtgctgcggaggctgctagcccctcgggacccctgcgggagcggggcaagacccccgccacccccacctcgcagttcgtcttcagctttccggtctccgtgggcgtgcactcggcccccagcagcctgccctacctgcacagccccatcaccacctctcccagctgttagagccgccctgggggccccagaaccagagctggctcccagcaagggtaggacgggccgcatgcggcagaaagttgggactgagcagctgggagcaggcgaccgagctccttccccatcatttctccttggccaacgacgaggccagccagaatggcaataaggactccgaatacataataaaagcaaacagaacactccaacttagagcaataaccggtgccgcagcagccagggaagaccttggtttggtttatgtgtcagtttcacttttccgatagaaatttcttacctcatttttttaagcagtaaggcttgaagtgatgaaacccacagatcctagcaaatgtgcccaaccagctttactaaagggggaggaagggagggcaaagggatgagaagacaagtttcccagaagtgcctggttctgggtacttgtccctttgttgtcgttgttgtagttaaaggaatttcatttttaaaagaaatcttcgaaggtgtggttttcatttctcagtcaccaacagatgaataattatgcttaataataaagtatttattaagactttcttcagagtatgaaagtacaaaaagtctagttacagtggatttagaatatatttatgttgatgtcaaacagctgagcaccgtagcatgcagatgtcaaggcagttaggaagtaaatggtgtcttgtagatatgtgcaaggtagcatgatgagcaacttgagtttgttgccactgagaagcaggcgggttgggtgggaggaggaagaaagggaagaattaggtttgaattgctttttaaaaaaaaaagaaaagaaaaagacagcatctcactatgttgccaaggctcatcttgagaagcaggcgggttgggtgggaggaggaagaaagggaagaattaggtttgaattgcttttttaaaaaaaaa

SEQ ID NO: 206 - DNA, 60 bp, Homo sapiens
aaagaaatcttcgaaggtgtggttttcatttctcagtcaccaacagatgaataattatgc

SEQ ID NO: 207 - DNA, 650 bp, Homo sapiens
ggcctttggactggaggcagaacgatttctgcaaacctaggtcctgaaggctttggggcttattggctggttctcaacctttttgttttttcttcccagcatgcatttcctatctaaacccagacttagtttaatttccttatctttcacttctgcttcattccagggaggaaaaatacacctgttaatggccaagatctccttgctaacacagaggcaaaaataaatgtctaatgtttttgaagcctccccttcctttccacaagcccccacccgcccccgcgtcaagctccttctcccacttcctactcccacacaacttcccagccactgaaacttttctttcaaatctctattatcctcttaacagttgcttgaataaatttatttttgcactatacattttctttttgccagatgtgtctaacaagtgtgtttggagagacctactcccagccccgtctccttccccgcctccccccgtcacattctctcaggccttctctggtatttataatatatcacagaagtacccagtcttatagccctcggttatgcctttttttgacattttattttttttaagctttttatatatatatatatataaatatattactttgtcaagtttttttgctgtacaaaagtct

SEQ ID NO: 208 - DNA, 60 bp, Homo sapiens
aattcttttttaaattggtatattgtaagatatctatgcaaaaaatgttatgtgacgcat

SEQ ID NO: 209 - DNA, 1053 bp, Homo sapiens
ggggatcctggagctggaggagctcctgcgggcagggaagtcttcttgcagccgtgtggacgaagtttggcccaaccttttcataggagatgcaaacagcatcaagtgtgcggagacaggcggctgaaagccggcagcacgaactgcccgtcagagaagtgcacagcctgggccagatactcccacaggatggactcactgcagaagcaggacctccggaggcccaagatccatggggcagtccaggcatctccctaccagccgcccacattggcttcgctgcagcgcttgctgtgggtccgtcaggctgccacactgaaccatatcgatgaggtctggcccagcctcttcctgggagatgcgtacgcagcccgggacaagagcaagctgatccagctgggaatcacccacgttgtgaatgccgctgcaggcaagttccaggtggacacaggtgccaaattctaccgtggaatgtccctggagtactatggcatcgaggcggatgacaaccccttcttcgacctcagtgtctactttctgcctgttgctcgatacatccgagctgccctcagtgttccccaaggccgcgtgctggtacactgtgccatgggggtaagccgctctgccacacttgtcctggccttcctcatgatctatgagaacatgacgctggtagaggccatccagacggtgcaggcccaccgcaatatctgccctaactcaggcttcctccggcagctccaggttctggacaaccgactggggcgggagacggggcggttctgatctggcaggcagccaggatccctgacccttggcccaaccccaccagcctggccctgggaacagcaggctctgctgtttctagtgaccctgagatgtaaacagcaagtgggggctgaggcagaggcagggatagctgggtggtgacctcttagcgggtggatttccctgacccaattcagagattctttatgcaaaagtgagttcagtccatctctataataaaatattcatcgtcgcaaaaaaaaaaaaaaaaaaaaaaaaaaaaaa

SEQ ID NO: 210 - DNA, 60 bp, Homo sapiens
cctgacccaattcagagattctttatgcaaaagtgagttcagtccatctctataataaaa

SEQ ID NO: 211 - DNA, 60 bp, Homo sapiens
ggaggaagggaatgaaacatttatggcctcaagatactatacatttaaagcaccccaatg

SEQ ID NO: 212 - DNA, 1490 bp, Homo sapiens
ggggcagcgcagggcagacggcggcaggagaagcaagatgaatgcaggctcagatcctgtggtcatcgtctcggcggcgcggaccatcataggttccttcaatggtgccttagctgctgttcctgtccaggacctgggctccactgtcatcaaagaagtcttgaagagggccactgtggctccggaagatgtgtctgaggtcatctttggacatgtcttggcagcaggctgtgggcagaatcctgttagacaagccagtgtgggtgcaggaattccctactctgttccagcatggagctgccagatgatctgtgggtcaggcctaaaagctgtgtgccttgcagtccagtcaatagggataggagactccagcattgtggttgcaggaggcatggaaaatatgagcaaggctcctcacttggcttacttgagaacaggagtaaagataggtgagatgccactgactgacagtatactctgtgatggtcttacagatgcatttcacaactgtcatatgggtattacagctgaaaatgtagccacaaaatggcaagtgagtagagaagatcaggacaaggttgcagttctgtcccagaacaggacagagaatgcacagaaagctggccattttgacaaagagattgtaccagttttggtgtcaactagaaaaggtcttattgaagttaaaacagatgagtttcctcgccatgggagcaacatagaagccatgtccaagctaaagccttactttcttactgatggaacgggaacagtcaccccagccaatgcttcaggaataaatgatggtgctgcagctgttgctcttatgaagaagtcagaagctgataaacgtgggcttacacctttagcacggatagtttcctggtcccaagtgggtgtggagccttccattatgggaataggaccaattccagccataaagcaagctgttacaaaagcaggttggtcactggaagatgttgacatatttgaaatcaatgaagcctttgcagctgtctctgctgcaatagttaaagaacttggattaaacccagagaaggtcaatattgaaggaggggctatagccttgggccaccctcttggagcatctggctgtcgaattcttgtgaccctgttacacacactggagagaatgggcagaagtcgtggtgttgcagccctgtgcattgggggtgggatgggaatagcaatgtgtgttcagagagaatgacaatgtgtgttcagagagaatgaattgcttaaactttgaacaacctcaatttctttttaaactaataaagtactaggttgcaatatgtgaaatcagaggaccaaagtacagatggaaaccatttcctacatcacaaaaacccaagtttacagcttgtactttactttaatgtgtaatactcaactcacggtacaagacaattgcatttaacattgttataaataaaaggaacatcagatcaatcattaaaaaaaaaaaa

SEQ ID NO: 213 - DNA, 60 bp, Homo sapiens
ccaagtttacagcttgtactttactttaatgtgtaatactcaactcacggtacaagacaa

SEQ ID NO: 214 - DNA, 2925 bp, Homo sapiens
agttcggcctgttttctcagtcccggcacccgccgcgaccgcaaaggcggccgcggttctaggaacttgacgtgatggggcttcctgaggagcgggtccggagcggcagcgggagccggggccaggaggaagctggagccggaggccgggcgcggagttggtctccgccgcccgaggtcagccgctccgcgcacgtcccctcgctgcagcgctaccgcgagctgcaccggcgctccgtggaggagccgcgggaattctggggagacattgccaaggaattttactggaagactccatgccctggcccattccttcggtacaactttgatgtgactaaagggaaaatcttcattgagtggatgaaaggagcaactaccaacatctgctacaatgtactggatcgaaatgtccatgagaaaaagcttggagataaagttgctttttactgggagggcaatgagccaggggagaccactcagatcacataccatcagcttctggtccaagtgtgtcagttcagcaatgttctccgaaaacagggcattcagaagggggaccgagtggccatctacatgcctatgatcccagagcttgtggtggccatgctggcatgtgcccgcattggggctttgcactccattgtgtttgcaggcttctcttcagagtctctatgtgaacggatcttggattccagctgcagtcttctcatcactacagatgccttctacaggggggaaaagcttgtgaacctgaaggagctggctgacgaggccctgcagaagtgtcaggagaagggtttcccagtaagatgctgcattgtggtcaagcacctggggcgggcagagctcggcatgggtgactccaccagccagtcccccccaattaagaggtcatgcccagatgtgcagatctcatggaaccaagggattgacttgtggtggcatgagctcatgcaagaggcaggggatgagtgtgagcccgagtggtgtgatgccgaggacccactcttcatcctgtacaccagtggctccacaggcaaacccaagggtgtggttcacacagttgggggctacatgctctatgtagccacaaccttcaagtatgtgtttgacttccatgcagaggatgtgttctggtgcacggcagacattggttggatcactggtcattcctacgtcacctatgggccactggccaatggtgccaccagtgttttgtttgaggggattcccacatatccggacgtgaaccgcctgtggagcattgtggacaaatacaaggtgaccaagttctacacagcacccacagccatccgtctgctcatgaagtttggagatgagcctgtcaccaagcatagccgggcatccttgcaggtgttaggcacagtgggtgaacccatcaaccctgaggcctggctatggtaccaccgggtggtaggtgcccagcgctgccccatcgtggacaccttctggcaaacagagacaggtggccacatgttgactccccttcctggtgccacacccatgaaacccggttctgctactttcccattctttggtgtagctcctgcaatcctgaatgagtccggggaagagttggaaggtgaagctgaaggttatctggtgttcaagcagccctggccagggatcatgcgcacagtctatgggaaccacgaacgctttgagacaacctactttaagaagtttcctggatactatgttacaggagatggctgccagcgggaccaggatggctattactggatcactggcaggattgatgacatgctcaatgtatctggacacctgctgagtacagcagaggtggagtcagcacttgtggaacatgaggctgttgcagaggcagctgtggtgggccaccctcatcctgtgaagggtgaatgcctctactgctttgtcaccttgtgtgatggccacaccttcagccccaagctcaccgaggagctcaagaagcagattagagaaaagattggccccattgccacaccagactacatccagaatgcacctggcttgcctaaaacccgctcagggaaaatcatgaggcgagtgcttcggaagattgctcagaatgaccatgacctcggggacatgtctactgtggctgacccatctgtcatcagtcacctcttcagccaccgctgcctgaccatccagtgaacatgatcctgacctttacctaggattcctcctgctccaaactttgcccatcctctttgccccctcaggagtgctgagggccagtgttgacccacactaccctcccttgaccagctgtctgggaccggaaaccagctttgtctccaggtagagacaacatcctgtgactgccaggcagaaaggacagggcccaggtcagcctcagtctgctgtgcctccagactgcagagctctcagaacccagaacagagacgaaaaggctacctctcctacccaagttaagtgttcaaaggggatgtgagggcctccactgaagcagggaggcagctgtgtaatcctatgtcagctctcttaggaagccccagtacttatattgggcatgcacttgcccttaaaaacaatgatttgtgagtccaggaacaatttactatttttaaaatattttgctgcttctgttctgggtctgaattcccttttgtgccagatgccagtactgtctgcccattggctccaggggctgtatgggcagattcagtctccagagggtattcagatcatctgcttctttgaaggagtaaatgtgttttgttcctagggccagaggagcttgtcttccttgtcctctgttcccaccctcccctgaacagaacccagcccataagagacattctcagatgaaactctgttttcttgccccagtcaggctcaagccctgtggttgtaggaataaagcctgtgatctcaa

SEQ ID NO: 215 - DNA, 60 bp, Homo sapiens
gaacgctttgagacaacctactttaagaagtttcctggatactatgttacaggagatggc

SEQ ID NO: 216 - DNA, 1894 bp, Homo sapiens
cgggaagcgcggcggggcctccagaccggggcgggcttaagggtgacatctgcgctttaaagggtccgggtcagctgactcccgactctgtggagtctagctgccagggtcgcggcagtgcggggagagatgactggggagcgacccagcacggcgctcccggacagacgctgggggccgcggattctgggcttctggggaggctgtagggtttgggtgtttgccgcgatcttcctgctgctgtctctggcagcctcctggtccaaggctgagaacgacttcggtctggtgcagccgctggtgaccatggagcaactgctgtgggtgagcgggagacagatcggctcagtggacaccttccgcatcccgctcatcacagccactccgcggggcactcttctcgcctttgctgaggcgaggaaaatgtcctcatccgatgagggggccaagttcatcgccctgcggaggtccatggaccagggcagcacatggtctcctacagcgttcattgtcaatgatggggatgtccccgatgggctgaaccttggggcagtagtgagcgatgttgagacaggagtagtatttcttttctactccctttgtgctcacaaggccggctgccaggtggcctctaccatgttggtatggagcaaggatgatggtgtttcctggagcacaccccggaatctctccctggatattggcactgaagtgtttgcccctggaccgggctctggtattcagaaacagcgggagccacggaagggccgcctcatcgtgtgtggccatgggacgctggagcgggacggagtcttctgtctcctcagcgatgatcatggtgcctcctggcgctacggaagtggggtcagcggcatcccctacggtcagcccaagcaggaaaatgatttcaatcctgatgaatgccagccctatgagctcccagatggctcagtcgtcatcaatgcccgaaaccagaacaactaccactgccactgccgaattgtcctccgcagctatgatgcctgtgatacactaaggccccgtgatgtgaccttcgaccctgagctcgtggaccctgtggtagctgcaggagctgtagtcaccagctccggcattgtcttcttctccaacccagcacatccagagttccgagtgaacctgaccctgcgatggagcttcagcaatggtacctcatggcggaaagagacagtccagctatggccaggccccagtggctattcatccctggcaaccctggagggcagcatggatggagaggagcaggccccccagctctacgtcctgtatgagaaaggccggaaccactacacagagagcatctccgtggccaaaatcagtgtctatgggacactctgagctgtgccactgccacaggggtattctgccttcaggactctgccttcaggaacacgggtctgtagagggtctgctggagacgcctgaaagacagttccatcttcctttagactccagccttggcaaaatcaccttccctttaccagggaaatcacttcctttaggactgaaagctaggcgtcctctcccacaaaaaagtcctgccctcatctgagaatactgtctttccatatggctaagtgtggccccaccaccctctctgcctcccgggacattgattggtcctgtcttgggcaggtctagtgagctgtagaattgaatcaatgtgaactcagggaactggggaaggctgagcctcctctttggtgttgcggtaagataaccgacagggctggtgaaagtccccagatggcaggatatttggtttcagagtaaggactaggtgcaccaccatgactgactatcaatcaaaatgtttgtaacttaaaatttttaatgaaggataatgaatatttta

SEQ ID NO: 217 - DNA, 60 bp, Homo sapiens
gtcctctcccacaaaaaagtcctgccctcatctgagaatactgtctttccatatggctaa

SEQ ID NO: 218 - DNA, 1430 bp, Homo sapiens
aggtgagagaggatgtgtgctgggccttggaggaagggggccgagaccgggccttacttctgtaacgatactgtgaggcatcggaaggccagcctgttgtgtccgttttgaaggatgcccctgtcccgctggttgagatctgtgggggtcttcctgctgccagccccctactgggcaccccgggagaggtggctgggttccctacggcggccctccctggtgcacgggtacccagtcctggcctggcacagtgcccgctgctggtgccaagcgtggacagaggaacctcgagccctttgctcctccctcagaatgaacggagaccagaattcagatgtttatgcccaagaaaagcaggatttcgttcagcacttctcccagatcgttagggtgctgactgaggatgagatggggcacccagagataggagatgctattgcccggctcaaggaggtcctggagtacaatgccattggaggcaagtataaccggggtttgacggtggtagtagcattccgggagctggtggagccaaggaaacaggatgctgatagtctccagcgggcctggactgtgggctggtgtgtggaactgctgcaagctttcttcctggtggcagatgacatcatggattcatcccttacccgccggggacagatctgctggtatcagaagccgggcgtgggtttggatgccatcaatgatgctaacctcctggaagcatgtatctaccgcctgctgaagctctattgccgggagcagccctattacctgaacctgatcgagctcttcctgcagagttcctatcagactgagattgggcagaccctggacctcctcacagccccccagggcaatgtggatcttgtcagattcactgaaaagaggtacaaatctattgtcaagtacaagacagctttctactccttctaccttcctatagctgcagccatgtacatggcaggaattgatggcgagaaggagcacgccaatgccaagaagatcctgctggagatgggggagttctttcagattcaggatgattaccttgacctctttggggaccccagtgtgaccggcaaaattggcactgacatccaggacaacaaatgcagctggctggtggttcagtgtctgcaacgggccactccagaacagtaccagatcctgaaggaaaattacgggcagaaggaggctgagaaagtggcccgggtgaaggcgctatatgaggagctggatctgccagcagtgttcttgcaatatgaggaagacagttacagccacattatggctctcattgaacagtacgcagcacccctgcccccagccgtctttctggggcttgcgcgcaaaatctacaagcggagaaagtgacctagagattgcaagggcggggagaggaggctctcaataaataatcgtgtaacctt

SEQ ID NO: 219 - DNA, 60 bp, Homo sapiens
ggatcttgtcagattcactgaaaagaggtacaaatctattgtcaagtacaagacagcttt

SEQ ID NO: 220 - DNA, 3149 bp, Homo sapiens
agggggcgcggtgggaggagtaggagaagacaaaagccgaaagcgaagagggcccgggctgcacacaccggctgggaggcagccgtctgtgcagcgagcagccggcgcggggaggccgcagtgcacggggcgtcacagtcggcaggcagcatggggaagggagggaaccagggcgagggggccgccgagcgcgaggtgtcggtgcccaccttcagctgggaggagattcagaagcataacctgcgcaccgacaggtggctggtcattgaccgcaaggtttacaacatcaccaaatggtccatccagcacccggggggccagcgggtcatcgggcactacgctggagaagatgcaacggatgccttccgcgccttccaccctgacctggaattcgtgggcaagttcttgaaacccctgctgattggtgaactggccccggaggagcccagccaggaccacggcaagaactcaaagatcactgaggacttccgggccctgaggaagacggctgaggacatgaacctgttcaagaccaaccacgtgttcttcctcctcctcctggcccacatcatcgccctggagagcattgcatggttcactgtcttttactttggcaatggctggattcctaccctcatcacggcctttgtccttgctacctctcaggcccaagctggatggctgcaacatgattatggccacctgtctgtctacagaaaacccaagtggaaccaccttgtccacaaattcgtcattggccacttaaagggtgcctctgccaactggtggaatcatcgccacttccagcaccacgccaagcctaacatcttccacaaggatcccgatgtgaacatgctgcacgtgtttgttctgggcgaatggcagcccatcgagtacggcaagaagaagctgaaatacctgccctacaatcaccagcacgaatacttcttcctgattgggccgccgctgctcatccccatgtatttccagtaccagatcatcatgaccatgatcgtccataagaactgggtggacctggcctgggccgtcagctactacatccggttcttcatcacctacatccctttctacggcatcctgggagccctccttttcctcaacttcatcaggttcctggagagccactggtttgtgtgggtcacacagatgaatcacatcgtcatggagattgaccaggaggcctaccgtgactggttcagtagccagctgacagccacctgcaacgtggagcagtccttcttcaacgactggttcagtggacaccttaacttccagattgagcaccacctcttccccaccatgccccggcacaacttacacaagatcgccccgctggtgaagtctctatgtgccaagcatggcattgaataccaggagaagccgctactgagggccctgctggacatcatcaggtccctgaagaagtctgggaagctgtggctggacgcctaccttcacaaatgaagccacagcccccgggacaccgtggggaaggggtgcaggtggggtgatggccagaggaatgatgggcttttgttctgaggggtgtccgagaggctggtgtatgcactgctcacggaccccatgttggatctttctccctttctcctctcctttttctcttcacatctcccccatagcaccctgccctcatgggacctgccctccctcagccgtcagccatcagccatggccctcccagtgcctcctagccccttcttccaaggagcagagaggtggccaccgggggtggctctgtcctacctccactctctgcccctaaagatgggaggagaccagcggtccatgggtctggcctgtgagtctccccttgcagcctggtcactaggcatcacccccgctttggttcttcagatgctcttggggttcataggggcaggtcctagtcgggcagggcccctgaccctcccggcctggcttcactctccctgacggctgccattggtccaccctttcatagagaggcctgctttgttacaaagctcgggtctccctcctgcagctcggttaagtacccgaggcctctcttaagatgtccagggccccaggcccgcgggcacagccagcccaaaccttgggccctggaagagtcctccaccccatcactagagtgctctgaccctgggctttcacgggccccattccaccgcctccccaacttgagcctgtgaccttgggaccaaagggggagtccctcgtctcttgtgactcagcagaggcagtggccacgttcagggaggggccggctggcctggaggctcagcccaccctccagcttttcctcagggtgtcctgaggtccaagattctggagcaatctgacccttctccaaaggctctgttatcagctgggcagtgccagccaatccctggccatttggccccaggggacgtgggccctgcaggctgcaggagggcactggagctgggaggtctcgtcccagccctccccatctcggggctgctgtgtggacggcgctgcctcaggcactctcctgtctgaacctgcccttactgtgtttaacctgttgctccaggatgcattctgataggagggggcggcagggctgggccttgtgacaatctgcctttcaccacatggccttgcctcggtggccctgactgtcagggagggccagggaggcagagcgggagggagtctcaggaggaggctgccctgaggggctggggagggggtacctcatgaggaccagggtggagctgagaagaggaggaggtgggggctggaggtgctggtagctgaggggacgggcaagtgagaggggagggagggaagtcctgggaggatcctgagctgctgttgcagtctaacccactaatcagttcttagattcaggggaagggcaggcaccaacaactcagaatgggggctttcggggagggcgcctagtccccccagctctaagcagccaggagggacctgcatctaagcatctgggttgccatggcaatggcatgccccccagctactgtatgcccccgacccccgcagaggcagaatgaacccatagggagctgatcgtaatgtttatcatgttacttccccacccctacattttttgaaataaaataaggaattttattctc

SEQ ID NO: 221 - DNA, 60 bp, Homo sapiens
acccatagggagctgatcgtaatgtttatcatgttacttccccacccctacattttttga

SEQ ID NO: 222 - DNA, 60 bp, Homo sapiens
cctcatccctagggtgttgtgtagaactctttttaaactctatgctccgagtagagttca

SEQ ID NO: 223 - DNA, 1635 bp, Homo sapiens
gggggtggcggggacgcgagtggcggccgcggggccccggacaagggtccgcagagctgcagccttcgagggccagccctctccgagtccggggctgggtcccaccagtgacaaggcggcagccccgcgcacaccaaagagaaagcggctgtggcggcagcggcagccccagccatgctgtgttatgtgacgaggccggacgcggtgctgatggaggtggaggtggaggcgaaagccaacggcgaggactgcctcaaccaggtgtgcaggcgactgggaatcatagaagttgactattttggactgcaatttacgggtagcaaaggtgaaagtttatggctaaacctgagaaaccggatctcccagcagatggatgggctagccccttacaggcttaaacttagagtcaagttcttcgtggagcctcatctcatcttacaggagcagactaggcatatctttttcttgcacatcaaggaggccctcttggcaggccacctcttgtgttccccagagcaggcagtggaactcagtgccctcctggcccagaccaagtttggagactacaaccagaacactgccaagtataactatgaggagctctgtgccaaggagctctcctctgccaccttgaacagcattgttgcaaaacataaggagttggaggggaccagccaggcttcagctgaataccaagttttgcagattgtgtcggcaatggaaaactatggcatagaatggcattctgtgcgggatagcgaagggcagagactgctcattggggttggacctgaaggaatctcaatttgtaaagatgactttagcccaattaataggatagcttatcctgtggtgcagatggccacccagtcaggaaagaatgtatatttgacggtcaccaaggaatctgggaacagcatcgtgctcttgtttaaaatgatcagcaccagggcggccagcgggctctaccgagcgataacagagacgcacgcattctacaggtgtgacacagtgaccagcgccgtgatgatgcagtatagccgtgacttgaagggccacttggcatctctgtttctgaatgaaaacattaaccttggcaagaaatatgtctttgatattaaaagaacatcaaaggaggtgtatgaccatgccaggagggctctgtacaatgctggcgttgtggacctcgtttcaagaagcaaccagagcccttcacactcgcctctgaagtcctcagaaagcagcatgaactgcagcagctgcgagggcctcagctgccagcagacccgggtgctgcaggagaagctacgcaagctgaaggaagccatgctgtgcatggtgtgctgcgaggaggagatcaactccaccttctgtccctgtggccacactgtgtgctgtgagagctgcgccgcccagctacagtcatgtcccgtctgcaggtcgcgtgtggagcatgtccagcacgtctatctgccaacgcacaccagtcttctcaatctgactgtaatctaatctgttgtgcttttgttggacttggcatgtttccatgaactgcactattataaactattaaaatgatagatgttggagaaagtaattattccaacacccatctgcccatgcgatgttaaaaaa

SEQ ID NO: 224 - DNA, 60 bp, Homo sapiens
ccaacgcacaccagtcttctcaatctgactgtaatctaatctgttgtgcttttgttggac

SEQ ID NO: 225 - DNA, 5813 bp, Homo sapiens
ctgcaggccgcccgcgtctgccctcgcggcgcgctcccgggcccggccgcggttccccactcgggccggctggctcgcgggttctctcgccccgcccccctcggcgccaccgctgggcgcttgcgcggggcgcgtggccgtggccagggtctccgccgcagcccgagcagccgccgccgcctcagtcagtcagtcagtccccagcaatggcggacggaggtgagcgagaggagctgctctcgccgtcaccggtctctccggctaagcggcagtgttcgtggcccagcccgcaggctcatcaccctcgcggttcgcctggggcagccggcggaggggcagggggcgtcggcagcagctgcctggtcctcggggcccgcccccacctgcagccggattccttactggactgcgccgccaagacggtggcggaaaagtgggcatacgaacgggtggaggagcgcttcgagcggatcccggagcccgtgcagcgccgcatcgtctactggtccttcccgcggaatgagcgggagatctgcatgtactccagcttccagtaccggggcggccccggcgccggcgctgctggcggcgccgcgggggcttcgccggccgaggaggggccgcagccaccccccggggccgccgctccggccggctccgcccccgggggcgtcgcggctggggcatcccccgggctgggcgcaggggccggcgcggccggctgcggtggcgaggggctcccgttccgccggggcatccgtctgctggacagcggctccgtggagaacgtgctgcaagtcggctttcatctgagtggcacagtaactgagctggccactgcctctgaaccagcagtgacttataaagttgcaatcagttttgatcgatgcaaaatcacctcagtgacatgtggctgtgggaacaaggacatattctactgtgcccatgtggtagcactctcactctacaggatccgtaaaccagaccaagtcaaattgcgtcttcctatctccgaaacccttttccagatgaatagggaccagctacaaaagtttattcaatatttaatcacggcacaccacactgaagttcttcctactgcacagaaactggcagatgagattctatcctccaactcagaaatcaaccaagtgaatggtgcccctgaccccacagctggggccagcattgacgatgagaactgttggcatttggatgaagaacaggtgaaagaacaagtgaagctttttctctcccagggcggttactgtggctctggaaagcaactcaactcaatgtttgccaaggttcgagaaatgctgcggatgagagattccaatggagcaaggatgctgacactaataactgagcagtttgtggctgacccacgactcacactctggaggcagcaaggaacaaacatgacagacaagtgcaggcagctctgggatgagctaggggctttatgggtgtgcataattttaaatccacactgcaaactggaggagaaatcctgctggctgcagcagctgcagaagtggagcgacctggatgtctgtcccctggaggatggaaactatggacatgagctgcccaacatcaccaatgcacttccccagagtgccattcacagcccagactccttatccagaccaagacgaacagtattcactagagccattgaggggcgtgaattacattggcaggatagccacctacagcgaataatcagcagtgatgtttatacagctcctgcctgccagcgggaaagtgaaagactactctttaattcccaaggccagccactgtggcttgagcatgtgcctacagcctgtgctcgagttgacgccctgcgttcccatggttatccaaaagaggccctcagactcacagtggccattattaatactctgaggttgcagcagcagcggcaactggaaatctacaagcatcagaagaaagaactgttgcagagaggaaccacaaccatcacaaacctggagggctgggtgggccaccccctggatcccatcgactgcctgtttctcactttgactgaggcctgccgcctgaatgatgatggctatctggagatgtcagatatgaatgaaagcagaccccctgtgtaccagcatgtacctgtggctgcaggctccccaaacagcagtgagtcctacctgtcattggccctggaagttgcactgatgggcctgggtcaacagaggttaatgcctgaaggcctctacgcacaggacaaggtatgccgtaatgaggagcagctcctgagccaactccaagagctgcagctggacgatgagctagtgcaaacactgcaaaaacaatgcatcttactgctggaaggaggtcctttcagcggtctgggagaagtcatccaccgagagagtgttcccatgcatacctttgccaagtatttgttctcagctctgctgcctcatgatccagacctgtcctataaattagccttacgtgccatgaggttacctgttttagaaaactcagcttctgcaggcgacacatcccaccctcaccatatggtgtctgtggtgcccagccgttatcctcgctggttcacgcttggacacttggaatcacagcagtgtgaactggcctccaccatgctgactgctgccaaaggagacactttgagactccgaacaattctggaagcaatacagaagcacattcattcttcctccctcatcttcaaactggcccaagatgcattcaagattgctactcccaccgacagtagtactgacagcaccctgctcaacgttgccctggaacttgggttacaggtgatgcggatgaccttatcaacccttaactggagacgcagggagatggtacgatggttggtgacctgtgctacagaagtgggtgtgcgggccctggtgagcatcttgcagagctggtacacactcttcacccctactgaggctactagtattgtagctgccacagccgtatcccacaccactatcctgcgcctcagtcttgactatccacagcgggaggaactggctagctgtgctcgcacactggctctacagtgtgctatgaaggatccacagagctgtgccctgtcagcccttacactctgtgagaaagaccacattgcctttgaggcagcctaccagattgccattgatgctgctgctggtggtatgacccattcacagctgttcaccatcgcccgctacatggagctccgtggctacccgctacgtgccttcaagctggcctcattggccatgagccatcttaacctggcctacaaccaggatactcacccagccatcaatgatgtgctctgggcttgtgctctcagccactctctgggcaagaatgagctggcagctctcatccccctggtggtgaagagtgtgcactgtgccacagtgctttcagacatcttacgacgctgcacagtgactgcacctggcctggccggcatcccaggccgccgaagctctggaaagctcatgtccactgacaaagctccattgcgccagttgctggatgccaccatcaatgcctatatcaacactacacactcacgcctaacacacatcagccctcgccactatggagagttcattgagtttctaagcaaggctcgggagaccttcctgctgccccaggatggccacctgcagtttgcccagttcatcgacaacctcaaacagatctacaaaggcaagaaaaagttgatgctgctggtgcgagagcgctttggctgagagagcagatagctcactgccagagcagcctgggttcccaggtagtatcaggtcaggccaagggcactgaaacatttgtccaccctgagagaactctgagcacctgtggatgaggccaaaggaccacagggctaaggatggggaaagtccagctctagtcgataatgcctaccttggcaagcttctgactacagcctactgttcatggaggagctgggccctgcagatcgaccagaaaccccacaacatgccacctcatgcccctatatcctgcgtgtcctgagcattggccctgtctcccttggcaaacacagaacactgttccatctcagggattgcttaaccagagaaacagacacatttgtgggactgtaaatactatatgtgttgctaattattgtaaacttgtaactatttataattctgcttctgatttgatgggcacttgaagtagctgtgggtaggaggatatgcttattttctgaggagactcacaaccatttctcaggtttcccttgcagagtgtttgctggtagcagtggaagagtgggggtgccaaggagaaaaatggccagttaggatcaacccaagtctagtctatgcagaatcccccacctacagacagggcatttatagtccagtggtgagtgagggacagaggccaggactggacttagacttttgcctcacaaaactgtgaggacattgaagctcctgcctcacacagcctcttcaggagcctgctgaacacctgagaaacaagtgcagggagaagatgaaggtctgggaagccgctgagttcataatattcatctactgtggtcacctttgtgttagcaagtgtgtggtttcatctataattgtgtgtgtgtatctttatggctaagtacatgtgtgtatgtacatagatacatctgtgcatgcctgtttgtgcacatatatatttatgtgtatgtgtcagttctatggctgtgtacctgtttgaatatgtgcacactggactgtgagtttctacgtgaggatatacacattttgtgtacatgtgaggatgcacatctttgtgcaaatgcactcatgtttgtgcatgtttagtatgtgtatctgcgtacacgagtgcatgtgtataaacatgtttgtatccatgtgtatgcttgttatccatgcatctgtgtctttatatgtgtaactgagcgtatttctacatgtagggatgtctgtgtattcatgtttgaggatctgcatcaatgtgtcctttttgccagatttctctttcccattcctcttaaatctctctcgccagctaaacgtttgttccccatctctgtgcctcctctattcattctctcaccaaacaagcttctaagcaccaatctccctctgccatcagattggctgctttagctccatagttctcttctcgcctcatacttgctttcttcccctgcctttctacctcaagcttcctcgccggcttttgtcacagtctcattgctcgctgacttggaggctagggctggtctgcacttagcctctcccttcctaatttctagccctagtgggcagtcctgtcttagccctggctgacctccatagtgtatcatgttcctgctaccttcctgacccctgtgctcagcctggaattgttataggaggtagcaagggcactcagaaaagtcagttggaaccagtgtcttggtgtttactgtttcatgtcttagttcctgagttgggggtggggtttgatagggaaggggtggtatagctagaatgtgaactaagaacttctccatctgctttactttttctttcttcgacaaactgtcaccttttttactccaaactgaccaagaagttgtatttgccatttgtggctactcaagtcttactgtccagccaagggcccctacgtctcagcccaatgggttggttaaaaaaaaagagagaagccactctcatttctgtatcacagttgcccttttttagcaagtgtgtgaattcacagtgcttttctatgaataaatcatggatcacataaaagatcatttttct

SEQ ID NO: 226 - DNA, 60 bp, Homo sapiens
ctttcttcgacaaactgtcaccttttttactccaaactgaccaagaagttgtatttgcca

SEQ ID NO: 227 - DNA, 2101 bp, Homo sapiens
ggagggttttgctctttgtgtgggtgtgtgagtggctatgatcctagttgtccagctgctgcgtggagaataagtaaagcaggtctgaatgacaccaggtcgctgctgtcttgcggctgacattcaggtagagacgttcatcttcactgacggggaagatgaggccctggccaggcacacgggcaacgtggtcatcacaaactgctcggccgcccacagccgccaggcgctgtcctgcaagatggccgtggagtatgaccgcttcatcgagtccggcaggaagtggttctgccacgtggacgatgacaactacgtcaacctgcgggccctgctgcggctgctggccagctacccgcacacgcgggacgtctacgtcggcaagcccagcctggacaggcccatccaggccatggagcgggtcagcgagaacaaggtgcgtcctgtccacttctggtttgccacgggcggcgctggcttctgcatcagccgtgggctggctctgaagatgagcccgtgggccagcgggggtcacttcatgaatacggctgagcggatccggctgcctgatgactgcaccatcggctacatcgtggaggccctgctgggtgtgcccctcatccgcagcggcctcttccactcccacctggagaacctgcagcaggtgcccacctcggagctccacgagcaggtgacgctgagctacggtatgtttgaaaacaagcggaacgccgtccacgtgaaggggcccttctcggtggaggccgacccatccaggttccgctccatccactgccacctgtacccggacacaccctggtgtccccgcactgccatcttctagtggccatggctgagacccaatccctgggcgcccctggtatccaaagggcccagggaccctgttgcgctgccctggcctcggcattcgaggctcccctagggccgtgcctgtgcgtgtgcgtgtgcatgtgcgtgtgtgtgtgtgtgtactgcatgcccacccgggtagcaggctgctgggcagttctgctctgtggaggggcgggcaccagcgccacttatgtgcctctgctccgagggccagtgggctgcagggcctgcttggaggaaggatttgtgtgtcggaggccactccgagggcaattctgttaggatttttggatctttctacagctacggggctccgggctactttgcagggatgcgatgcgtaggtgcctttctcttcctgctgaccacaagctctgtgctgggggtacctgtgccctgaagtcctggcccctgtgtcatagccccaagtacgactcactgagccatgctcattgcaggggaggctgggtctgggggtgcgtgacccaatccccttcctcctggcctggacgctgtggcttaagagtaacagcagccaccgcccagttccagtggccccacgaagcccccagtggctggctgtccagctgggcaaacagtggcacccctcccagctcttctgagtggggagtcttccaggcctcctcagaggtcttccctttgcctccccaggacagggtgagtcagagctcagcatttaatctcctctccaaagtagagagcaagtcgcccacagtgggcgtgtctgtaaatattgtgacagtatttttttactgtgctgttttttttgaaaggggatgggtaaaaagtagggtgttcttgttttttgcttgggagggtgggggtgggggagggtcttattttatcttatcttttctgtggatcagaaaaaacagaagccaaactcggggtcatctttgtttttaaagctgaagtgggactgtctggcactctgtgtatttatgcgttccagcatctggaacctcccatccctgccctcctcctgtgtagctgccacctccccgctgggcccagcatggctcacctgtcccgtgggctgtgtttcttgttgtttttctctttgcaaagacatagctaggaaagcgaatgataagggaaaagttctcagggaattgaagtgttgttgctatggtgacgtccttttgctgtgaataaaggtgctctttgcagcaaaaaaaaaaaaaaaaaaaaaaaaaaaaaaaaaaaaaaa

SEQ ID NO: 228 - DNA, 60 bp, Homo sapiens
ttgtttttctctttgcaaagacatagctaggaaagcgaatgataagggaaaagttctcag

SEQ ID NO: 229 - DNA, 1832 bp, Homo sapiens
cggccatggaccgcttcgtttggaccagcggcctcctggagatcaacgagaccctggtgatccagcagcgcggggtgcgaatctacgatggcgaggagaagataaaatttgatgctgggactctccttcttagtacacaccgactgatttggagagatcagaaaaatcatgagtgttgcatggccattctcctttcccaaattgtgttcattgaagaacaggcggctggaattgggaagagtgccaaaatagtggttcatcttcacccagctcctcctaacaaagaacctggcccattccagagtagtaagaactcctacatcaaactctccttcaaagaacatggccagattgagttttacaggcgtttatcagaggaaatgacacaaagaagatgggagaatatgccagtttcccagtcattacaaacaaatagaggaccccagccaggaagaataagggctgtaggaattgtaggtattgaaaggaaactggaagaaaaaagaaaagaaactgacaaaaacatttctgaggcctttgaagacctcagcaaactaatgatcaaggctaaggaaatggtggaattatcaaaatcaattgctaataaaattaaagacaaacaaggtgacatcacagaagatgagaccatcaggtttaaatcctacttgctgagaatgggaatagctaacccagttaccagagaaacctacggctcaggcacacagtaccacatgcagctggccaaacaactggctggaatattgcaggtgcctttagaggaacgagggggaataatgtcactcacggaggtgtactgcttagtaaaccgagctcgaggaatggaattgctctcaccagaagatttagtgaatgcgtgcaagatgctggaagcactgaaattgcctctcaggctccgtgtgtttgacagtggcgtcatggtaattgagcttcagtctcacaaggaagaggaaatggtggcctcggccctggagacagtttcagaaaagggatccctaacatcagaagagtttgctaagcttgtgggaatgtctgtcctcctagccaaagaaaggttgctgcttgcagagaagatgggccatctttgccgtgatgactcagtggaaggcctgcgtttttacccaaatttatttatgacacagagctaagggttttgtatttaaaatcctttttgtccatatgcttgcgtcatgtagaggttgtatgacattgagctaagagataaaccccgatcaattgagaatttattggaacttcacagtgcaatgtaaatctcttttaatttctccccaaatatggtccaggaaatttatttagtatacgcataggaaaattcagaaaagtgaatgccaatatgaatttaaaatcatgctatagtgcagaaccctcagagtttaacttggaatatagtggattttaacttgatcctcaaatctaatcattttataaagaagggaatttagttttgcagagaataaaaagagaagttgcatgttcagacaggttagattattattttggtgtaactgaaattcactgattgcacatgacaatgttgggacaaaatatactgcagcatgctatatgaggctcctccccagggcttttagaagcagtcatagacatgtcttcaacataccaaataaaatacctttaaaaatgaaataattttatttgacacattatttatatatattctatctaggtttctctttgttttttttaaagtgatgatttcatggactgggcatttaaaagaaatggcaactgtggtccatttttggtttttccaaatgctgtggaatttttggaaa

SEQ ID NO: 230 - DNA, 60 bp, Homo sapiens
ccagggcttttagaagcagtcatagacatgtcttcaacataccaaataaaatacctttaa

SEQ ID NO: 231 - DNA, 2618 bp, Homo sapiens
atgaagcacctgaagcggtggtggtcggccggcggcggcctcctgcacctcaccctcctgctgagcttggcggggctccgcgtagacctagatctttacctgctgctgccgccgcccaccctgctgcaggacgagctgctgttcctgggcggcccggccagctccgcctacgcgctcagccccttctcggcctcgggagggtgggggcgcgcgggccacttgcaccccaagggccgggagctggaccctgccgcgccgcccgagggccagctgctccgggaggtgcgcgcgctcggggtccccttcgtccctcgcaccagcgtggatgcatggctggtgcacagcgtggctgccgggagcgcggacgaggcccacgggctgctcggcgccgccgccgcctcgtccaccggaggagccggcgccagcgtggacggcggcagccaggctgtgcaggggggcggcggggacccccgagcggctcggagtggccccttggacgccggggaagaggagaaggcacccgcggaaccgacggctcaggtgccggacgctggcggatgtgcgagcgaggagaatggggtactaagagaaaagcacgaagctgtggatcatagttcccagcatgaggaaaatgaagaaagggtgtcagcccagaaggagaactcacttcagcagaatgatgatgatgaaaacaaaatagcagagaaacctgactgggaggcagaaaagaccactgaatctagaaatgagagacatctgaatgggacagatacttctttctctctggaagacttattccagttgctttcatcacagcctgaaaattcactggagggcatctcattgggagatattcctcttccaggcagtatcagtgatggcatgaattcttcagcacattatcatgtaaacttcagccaggctataagtcaggatgtgaatcttcatgaggccatcttgctttgtcccaacaatacatttagaagagatccaacagcaaggacttcacagtcacaagaaccatttctgcagttaaattctcataccaccaatcctgagcaaacccttcctggaactaatttgacaggatttctttcaccggttgacaatcatatgaggaatctaacaagccaagacctactgtatgaccttgacataaatatatttgatgagataaacttaatgtcattggccacagaagacaactttgatccaatcgatgtttctcagctttttgatgaaccagattctgattctggcctttctttagattcaagtcacaataatacctctgtcatcaagtctaattcctctcactctgtgtgtgatgaaggtgctataggttattgcactgaccatgaatctagttcccatcatgacttagaaggtgctgtaggtggctactacccagaacccagtaagctttgtcacttggatcaaagtgattctgatttccatggagatcttacatttcaacacgtatttcataaccacacttaccacttacagccaactgcaccagaatctacttctgaaccttttccgtggcctgggaagtcacagaagataaggagtagataccttgaagacacagatagaaacttgagccgtgatgaacagcgtgctaaagctttgcatatccctttttctgtagatgaaattgtcggcatgcctgttgattctttcaatagcatgttaagtagatattatctgacagacctacaagtctcacttatccgtgacatcagacgaagagggaaaaataaagttgctgcgcagaactgtcgtaaacgcaaattggacataattttgaatttagaagatgatgtatgtaacttgcaagcaaagaaggaaactcttaagagagagcaagcacaatgtaacaaagctattaacataatgaaacagaaactgcatgacctttatcatgatatttttagtagattaagagatgaccaaggtaggccagtcaatcccaaccactatgctctccagtgtacccatgatggaagtatcttgatagtacccaaagaactggtggcctcaggccacaaaaaggaaacccaaaagggaaagagaaagtgagaagaaactgaagatggactctattatgtgaagtagtaatgttcagaaactgattatttggatcagaaaccattgaaactgcttcaagaattgtatctttaagtactgctacttgaataactcagttaacgctgttttgaagcttacatggacaaatgtttaggacttcaagatcacacttgtgggcaatctgggggagccacaacttttcatgaagtgcattgtatacaaaattcatagttatgtccaaagaataggttaacatgaaaacccagtaagactttccatcttggcagccatcctttttaagagtaagttggttacttcaaaaagagcaaacactggggatcaaattattttaagaggtatttcagttttaaatgcaaaatagccttattttcatttagtttgttagcactatagtgagcttttcaaacactattttaatctttatatttaacttataaattttgctttctatggaaataaattttgtatttgtattaaaaattaacttttcccttttatacaga

SEQ ID NO: 232 - DNA, 60 bp, Homo sapiens
ttcatagttatgtccaaagaataggttaacatgaaaacccagtaagactttccatcttgg

SEQ ID NO: 233 - DNA, 1123 bp, Homo sapiens
ccatcatggaagcaatgtggctcctgtgtgtggcgttggcggtcttggcatggggcttcctctgggtttgggactcctcagaacgaatgaagagtcgggagcagggaggacggctgggagccgaaagccggaccctgctggtcatagcgcaccctgacgatgaagccatgttttttgctcccacagtgctaggcttggcccgcctaaggcactgggtgtacctgctttgcttctctgcaggaaattactacaatcaaggagagactcgtaagaaagaacttttgcagagctgtgatgttttggggattccactctccagtgtaatgattattgacaacagggatttcccagatgacccaggcatgcagtgggacacagagcacgtggccagagtcctccttcagcacatagaagtgaatggcatcaatctggtggtgactttcgatgcagggggagtaagtggccacagcaatcacattgctctgtatgcagctgtgagggccctgcactcagaagggaagttacctaaagggtgctctgtgctcacgcttcagtctgtgaatgtgctgcgcaagtacatctcccttctggatctgcccttgtctctgcttcatacgcaggatgtcctcttcgtgctcaacagcaaagaagtggcacaggccaagaaagccatgtcctgccaccgcagccagctcctctggttccgccgcctctacattatcttctcccggtacatgagaatcaactcactgagcttcctctgaagccttgaagggttttcagatccaaggaacaaaggggaaaatagacaaaggagtgcagaggacctggcctggcactggcttatttacctgagctcaaggagatccccgctggagcagcctctgcaaaagggagcccatgtaggccaggggctgtccaaactccagcttcttcccctgggaaaaaacccaaagaaccaaaaacaaaccaccccaaggataataatagctacactgctagcttctcaagttcttgtgaaaaacaatttacataatgacacagtagatgtggaacacctagcccagtgcctgggcaggtccctattatcataaatgaacataaaagtgctctaaaaacactc

SEQ ID NO: 234 - DNA, 60 bp, Homo sapiens
tagctacactgctagcttctcaagttcttgtgaaaaacaatttacataatgacacagtag

SEQ ID NO: 235 - DNA, 3051 bp, Homo sapiens
aaggaagtttgcctctggtaccaccttgggactaagtgtatacccaactaagtcccttcatctccctggaccctgccttcaatcatccctcctcttgcaggtctccaacatgctaccggtgatagtgggcccattagtaatgggctcccacttgtcctccatcaccatgtggttttccttggccctcatcatcaccaccatctcccactgtggctaccaccttcccttcctgccttcgcctgaattccacgactaccaccatctcaagtaaggaccttctccccacaatgggtccctaggcaacaaccatcaccctccctccttaagcttctgatagcaggcactggtatctcagtttacatgtgagtgctagttggggaagaggtctgatggctgggaaaataaccacactgggatgaccttactcttttccttctgaaattgggtcctcctccaactgggggttttaaacctatatttggactctgggccctttgaataagctctggacattctctttagaaaagtacatatatgcataaaactcctgcaggcaatcacaagtaagtcatgtatctctgaaagccccagactttttcaagtgtagtctacaaacctcctataccagaatcacctgagatgcttgtttaaaatataggctcttgaattccactccaaatatgctgaactaaggtatctgggggagcagggcctggaaacctgcattttagttaagtgttccaggggattctgatgctggtgatctcatacctgaagaagcctagttctgctagagattctcagactgtgggcatcaatcacatagcaagcttttcaaaggaggactccagatacggcaaattgcaggtttggagtggcccccgggagatgcattggtagcaactccccagcttattctgatgcagatggtcaggatggtggtgacaggtgtggggtaggagggctgagaaatgtgtgaggctggcacaaatgaaatgggatctgcacggaagcctccagcatgggcactgcagtgccgtcctctctcttctaggttcaaccagtgctatggggtgctgggtgtgctggaccacctccatgggactgacaccatgttcaagcagaccaaggcctacgagagacatgtcctcctgctgggcttcaccccgctctctgagagcatcccagactccccaaagaggatggagtgagagacagcctaagtgtcatcctggctgtccctcagccatgggatgcagacacggcttcctgattgcacctaacaatttgcctccttcggccacacgccctaatgatggcaccaccagggtagagggaaggtcggcttcccggaaaagcagggccaaggatgaggctttcttcaaactactgcccttgatgtccctcaatgggatcaggagttagcttaagaaaaaggaaaacacagctccccagactggaggctggtcagagggaggagacccctggtcctctgctgtggaaggagaggggttcagccccagataactcctttgtggcctgggcaggatgcagagaatgacaaggctgaaaggagggggactggaggctgcctggctccagcgagagctccttctgggaccagagggtgggacggccaggtatcactttgccccttcctgccccaaaaggctttcacatacccgactcaggccagagccaagacaccctggcaaatcattataggtctcaattcatgacataccagatgccagtcgccacttcacccaacacacacacaaacatacacacaccaaacactctgagtgagtggtaaaggccccgtttttactctggcccaccgcaaacaaaaggtttccctctgtgggggagaaaaagaaatccaggagctcctccctggattaaaaccaacgaggtgcagaccaaactttaacacctttagccttatgtggaaaccaaaaaccaactgctgggaaactgtgaaaagcccttttacccacaaggggaggggtcaaagttgctgccctttggggacacccgagacccctaattagcctatctgaatgaggaccaaaggttagagccctctttctccccgaagaaagagcccggaaaaacatggcagagcaaagagcaaaatcctttctcccccgaatgctttaccagtttctcagcaacatttattcaagatgatttttaccaggaaccttatcaaaggcaaaaccacagctgcttgggttgaagtccccatcctggcctcctctcagccgccagacatggccaggaaccctgtggttcccaagaacaatttaaagatcactctttgatttgaaagaccaccattatcattttactaaattcttatatatacttgtgccttttccaactttcagttctcttaagaaaaacatccactgtagctttataaaataccttagtatcagctaggtccaagtctccaggcaggactatcaaaatggactccttcttcctatcagctctagaaccccagaggacttgcccagtaggccagctgagcacttaccaggcagcatctccctggccttccacagtctcgcctgtctgtctctggccttggtggacctggctccctccctaggaggcttttgccctcagcttgaatacagttcctggtgcatcaaagctgtaagttctcagctgctggcctgcactcatcacctcttcctacaaataaacatttggaaaaaagtccatcttcaatatgcttaaagagaagggtaggagataaggagaaagaacagatacggtttttttcccctttaaggcctttagattttgaggtactgtaaggggcctagaaggacaaaaggctttcattccctcttccttttggcaggcaggttatcagtccttggcagaagggcccagccctatccttttctgtatcaaacaaaatccttgaggttggtatacaagttaaggctgaaaaaaggccttaaattcccagtaaagaatgtgaaagcaagcatgtaaaataaactggtcttcatgaaaaaaaaaaaaaaaaaa

SEQ ID NO: 236 - DNA, 60 bp, Homo sapiens
atcaaacaaaatccttgaggttggtatacaagttaaggctgaaaaaaggccttaaattcc

SEQ ID NO: 237 - DNA, 4137 bp, Homo sapiens
ggcacgagcggcggaggcagtgtctcccggtcgcgcgtggaggtcggtcgctcagagctgctgggcgcagtttctccgcctgctgcttcggcgcggctgtatcggcgagcgagcgagttcccgcgagttctcggtggcgctcccccttcctttcagtctccacggactggcccctcgtccttctacttgaccgctcccgtcttccgccgccttctggcgctttccgttgggccgattcccgcccgcttcctcctgcttcccatcgaagctctagaaatgaatgtttccatctcttcagagatgaaccagattatgatgcatcattatcacagaagaaattcgtgtctatagcttttaaggacttgattacatcattttcaagcctgatagttttggaatcaccattagagcttaagacacacctgccttcatttcaaccacctgtcttcataccctgacgaagtgcaccttttaacactcctttgtccttggattacttaagagttcccagaaatacatttgccaccaacagagtagccaaatttataaggaaaaatgattcccaatggatatttgatgtttgaggatgaaaattttattgagtcttctgttgccaaattaaatgccctgaggaaaagtggccagttctgtgatgttcgacttcaggtctgtggccatgaaatgttagcacacagagcagtgctagcttgctgcagtccctatttatttgaaatctttaatagtgatagtgatcctcatggaatttctcacgttaaatttgatgatctcaatccagaagctgttgaagtcttgttgaattatgcctacactgctcagttgaaagcagataaggaattggtaaaagatgtttattctgcagcaaaaaagctgaagatggatcgagtaaagcaggtttgtggtgattatttactgtctagaatggatgttaccagctgcatctcttaccgaaattttgcaagttgtatgggagactcccgtttgttgaataaggttgatgcttatattcaggagcatttgttacaaatttctgaagaggaggagtttcttaagcttccaaggctaaagttggaggtaatgcttgaagataatgtttgcttgcccagcaatggcaaattatatacaaaggtaatcaactgggtgcagcgtagcatctgggagaatggagacagtctggaagagctgatggaagaggttcaaaccttgtactactcagctgatcacaagctgcttgatgggaacctactagatggacaggctgaggtgtttggcagtgatgatgaccacattcagtttgtgcagaaaaagccaccacgtgagaatggccataagcagataagtagcagttcaactggatgtctctcttctccaaatgctacagtacaaagccctaagcatgagtggaaaatcgttgcttcagaaaagacttcaaataacacttacttgtgcctggctgtgctggatggtatattctgtgtcatttttcttcatgggagaaacagcccacagagctcaccaacaagtactccaaaactaagtaagagtttaagctttgagatgcaacaagatgagctaatcgaaaagcccatgtctcctatgcagtacgcacgatctggtctgggaacagcagagatgaatggcaaactcatagctgcaggtggctataacagagaggaatgtcttcgaacagtcgaatgctataatccacatacagatcactggtcctttcttgctcccatgagaacaccaagagcccgatttcaaatggctgtactcatgggccagctctatgtggtaggtggatcaaatggccactcagatgacctgagttgtggagagatgtatgattcaaacatagatgactggattcctgttccagaattgagaactaaccgttgtaatgcaggagtgtgtgctctgaatggaaagttatacatcgttggtggctctgatccatatggtcaaaaaggactgaaaaattgtgatgtatttgatcctgtaacaaagttgtggacaagctgtgcccctcttaacattcggagacaccagtctgcagtctgtgagcttggtggttatttgtacataatcggaggtgcagaatcttggaattgtctgaacacagtagaacgatacaatcctgaaaataatacctggactttaattgcacccatgaatgtggctaggcgaggagctggagtggctgttcttaatggaaaactgtttgtatgtggtggctttgatggttctcatgccatcagttgtgtggaaatgtatgatccaactagaaatgaatggaagatgatgggaaatatgacttcaccaaggagcaatgctgggattgcaactgtagggaacaccatttatgcagtgggaggattcgatggcaatgaatttctgaatacggtggaagtctataaccttgagtcaaatgaatggagcccctatacaaagattttccagttttaacaaatttaagaccctctcaaactaacaggcttagtgatgtaattatggttagcagaggtacacttgtgaataaagagggtgggtgggtatagatgttgctaacagcaacacaaagcttttgcatattgcatactattaaacatgctgtacatactttttgggtttatttggaaaggaatgcaaagatgaaggtctgttttgtgtacttttaagactttggttattttactttttggaaaagaataaaccaagaattgattgggcacatcatttcaagaagtcccctctcctccacatttgttttgccaatttgcacattaaatgactcttccctcaaatgtgtactatggggtaaaaggggtagggtttaaagatgtagacagttgggttttttaagggccctttttcaataactggaacactctataacaaaggatacttatttaaatagatgacattgactatttttgtttttattaaaaggaagcttacatgcctaccaatatttaatcttttatgattgcctttttataactttttatattctcagcagagtgctttaccaattgaagtaaaatgtggcaggctggagttattgaagcagagtggcagtcttcagtttgcagagtaggggtctgtcttttaaactctgagtgcaaacttcagagttcttgccttggctgcagtttttttccttcaagaatgcagtactaacatttatttgagtggagttactgaacagtaacatagctgtgatttttggtatttgaaacactggttttaaatattttgacttgttgagggtatgttttatatagcaagacattatatagcagtaaaaaatggtgttttatcttctatataattcctgtttttattattaacaaaacagtcctaaatagcagccctcaattgtgaaaaaatttactttaaactacattaggttgtgaatgcaggttttatcagaactatgtttttgttcagtttatctgttcatatggataaatattggttgggatgacttggtgtctaatgtgtagtgctacacacctaacttatggggccaaaatagcatgtcctaatgcttgctgctgatttaaacacattaaaggtactttgcaggaaatccttgcaccatgggattaatatccaattgctgcttgtacactcattcattactaaaagttttgagaaatttttttttccagtaatgagcttaagaaatttgtggaaaataactcacctggcatcttacatctgaaataaggaatgatataaggtttttttttctcacagaagatgaagcacacaggaacctaatgggccaactgggatgaggtgactattctgagatgactattcagtggctaacttgggttaggaagaaaataattaggtattttctccaaatgttcactggtactctgccactttatttctctcatctgttacacaaagaaccaccaggaaagcaaatcagtttggttggtaactctgtaattcctaactatcactggtttggttctggactaaaactacattgacagattgaatttgcctaatatgatgactgtttttaatatggatctgtatgtgttctattcagcccaaggaaataaaattttagttgaggattcaaaaaaaaaaaaaaaa

SEQ ID NO: 238 - DNA, 60 bp, Homo sapiens
aactgtagggaacaccatttatgcagtggaggattcgatggcaatgaatttctgaatacg

SEQ ID NO: 239 - DNA, 2197 bp, Homo sapiens
attgtgaccagaggggtttgtgtggctgaagaggcaggaggaacagtgtatccacagcgtgggaccatgccaggcacaaaacggtttcaacatgtcattgagaccccggagcctggcaagtgggagttgtctgggtacgaggcagctgtgccaatcacggagaagtcaaacccactgacccaggatctagacaaagcagatgctgagaacattgttcgactgctagggcaatgtgatgctgagatcttccaggaggaggggcaagccctgtccacataccagagactctacagcgaatccattctgaccaccatggtacaggtggctgggaaagttcaggaagtgctgaaggagccagatggggggctggttgtgctgagtggagggggcacctctggccggatggcattcctcatgtcggtgtcctttaatcagctgatgaaaggtctgggacagaaacctctttacacctacctcattgcaggtggtgacaggtctgtggtggcctctagggaggggacagaagatagtgccttgcacgggattgaggaactgaagaaggtggctgccgggaagaagagagtgattgtcattggcatttctgtgggactctctgctccctttgtggcaggccagatggactgctgcatgaacaacacagctgtcttcttgccagtcctggttggcttcaatccagtgagcatggccagaaatgaccccattgaagactggagttcaacattccgacaagtagcagagcggatgcagaaaatgcaggagaaacagaaagcttttgtgctcaatcctgccatcgggcccgagggtctcagcggctcctcccggatgaaaggtggaagtgccaccaagattctgctggaaaccctgttattagcagcccataagactgtggaccagggcattgcagcatctcaaagatgcctcctggaaatcttgcggacatttgagcgagctcatcaggtgacctacagccaaagccccaagattgccaccctgatgaagagtgtcagcaccagtctggagaagaaaggccacgtgtacctggttggctggcagaccctgggcatcattgccatcatggatggagtagagtgcatccacacctttggtgctgatttccgagatgtccgtggctttctcattggtgatcacagtgacatgtttaaccagaaggctgagctcaccaaccagggtccccagttcaccttctcccaggaggacttcctgacttccatccttccctctctcacggaaatcgatactgtggtcttcattttcaccctggatgacaacctcacggaggtgcagactatagtggagcaggtgaaagagaagaccaaccacatccaggccctggcacacagcaccgtgggtcagaccttgccgatccctctgaagaagctctttccctccatcatcagcatcacatggccactgcttttctttgaatatgaagggaacttcatccagaagttccagcgtgagctaagcaccaaatgggtgctgaatacagtgagtacaggtgctcatgtgcttcttggtaagatcctacaaaaccacatgttggaccttcggattagcaactccaagctcttctggcgggcgctggccatgctgcagcggttctctggacagtccaaggctcgatgcatcgagagcctcctccgagcgatccactttccccagccactgtcagatgatattcgggctgctcccatctcctgccatgtccaggttgcacatgagaaggaacaggtgatacccatcgccttgctgagcctcctattccggtgctcgatcactgaggctcaggcacacctggctgcagctccttctgtctgtgaggctgtcaggagtgctcttgctgggccaggtcagaagcgcactgcggaccccctcgagatcctagagcctgacgttcagtgaacccatgtttctgggtgggtgaaaggggcccaaccctgcccacttcagcccagcccgcccaaggggacttgtgccagcagaacatgtgggaggaagaagccccgtttccagggcatccgcagcccagggtagggagaaatattctctccactttgggggagagttcttgctctcgacctagtggtttctactctcaccgacttattctgatttcagaaataaaatgaaatgtcttattttggaaaaaaaaaaa

SEQ ID NO: 240 - DNA, 60 bp, Homo sapiens
tgctctcgacctagtggtttctactctcaccgacttattctgatttcagaaataaaatga

SEQ ID NO: 241 - DNA, 2848 bp, Homo sapiens
gtttcgccggccgcgcggccagatgaggggggcgatggagctggagcctgagctgctgttgcaggaggcccgcgagaacgtggaggcagcgcagagctaccggcgggagctgggtcaccggcttgaggggctgcgtgaggcgcggaagcagatcaaagaaagtgcatcacagacaagggatgttctcaaacagcattttaatgatttaaagggaacccttggaaagctcctggatgagcgattggtgacccttttgcaagaggtggacaccattgaacaggagaccattaaaccactagatgactgccagaagctcatagaacacggagtcaacactgcagaggacttagtccgagaaggtgaaatcgccatgcttggtggtgtgggagaagagaatgagaaactgtggagctttaccaaaaaggcttcgcacattcagttggacagcttaccagaagtacctttactggttgatgtgccttgtttatctgctcagttggatgactcaattcttaacatagtgaaagaccacatttttaagcatggaacagtagcatctcgcccaccagtacagatagaagaactaatagagaaacctggaggcatcattgtacgatggtgtaaggtggatgatgactttacagcccaagattacaggctccagtttcgtaaatgtacttcaaatcattttgaggatgtatatgtaggttctgaaactgaattcatagtattgcacatagaccccaacgttgattaccagttcagagtctgcgcccgaggagatggccgacaggagtggagtccttggagtgtcccccagataggtcattccacattggtgcctcatgagtggacagctggttttgaggggtacagtctgagcagtcgaagaaatatagcacttcggaacgattctgaatcatcgggtgttctctactccagagctccgacttatttctgtgggcagacattaacattcagagttgaaactgtgggacagccagacagaagagacagcataggagtgtgtgcagaaaaacaggatggatatgactctctgcagcgggatcaagctgtgtgcattagtacaaatggtgcagtttttgtcaatggaaaagaaatgacaaatcagttacccgcagttacttctgggtccactgtcacgtttgacattgaagccgtgactctaggaaccaccagtaataatgaaggtggacacttcaagcttcgagtaactataagttcaaataatagagaagtggtttttgactggttacttgatcagtcttgtggttctctttactttggatgctcatttttctatcctggatggaaagtgttagtgttttagatgtttgggtgcttggctttggttttcagggtctaacgtagctgtcctcagcccagcgtagttgtaattgctttaaaaacaaagttgaattcatctctaacttaggccattggaaagtgtttactggattcattttgtaatattttagcaaaaagagacttgaatgttgtggacaaaatcatacaattcagtcaattttatttttagcatactgttaaatatcacatcacaataaaaatcaaattggcattaaaagtatagaagatataggaagttctatacccttccactgtacttctcaaagttggttattagaccaggaaaacttaatgtaatattatttttaaaatcatcttaaaggatccaagtccatgtaactctttagaacaagaggaataggtcagatagaagaagctgtgtaatgtattaatacatccgttcatgtgctgtccacatgaatgtgttgactgtgctctccatgttcaggtatttgtaagcagtgttgacttttatcccctcttcagtaatctttaagtccccaaaacattataattttttctttttttgttgagacggagtctcactcttgtcactcaggctggagtgcagtggtgtgatctcagttcactgcaacctctgcctcccacgttcaagcgatcctcctgcctcagcctcctgagtagctgggattacaggtgtcggccaccacacctggctaatttttgtatttttagtagagacagggtttcaccatgttggccaggctggtctttaactcctgacctcaggtgttccacccacctcagccttccaaagtgctaggattacaggcgtgagccactgcagtgggccaatttttgtatttttttaaatgcttgaccaagtgtctaaaataggcaagtagtaccttttgttctttcattgcaatttgatacagtataggctacagtatttttacagggtaaaactagttatggcagtagtatgcacagcagtgttagccatttcgtatgtatgtaatatgcacgtgtgtatccaatctgcctgtgacatgcattttactctttgcagagaatgagctgcagtccagtttaatgtcagtttaataagtggtctctttttagcagagcaaaaaaatatagcgtaaatacttattttttttaaaaacttacttaaatttgtgtgtaaaatatttatttgaaggactttaatatgtaaaaataattgtcttctatgccaccctacagattctattttaatgtgaattatttttttcatttttaccagtagtaaaaaagtagaaaagcaagtatgatatttttgtaagataatttatttggggattcatgttcccctgttagacaatcatgaccttttctacttgtctttttatatataagtagtagatttccacttgtttagggattaagaagatgttctagaatgtagataccttgtccagccataggaatcaaaataaaaaactaaaaaagttca

SEQ ID NO: 242 - DNA, 60 bp, Homo sapiens
agtagatttccacttgtttagggattaagaagatgttctagaatgtagataccttgtcca

SEQ ID NO: 243 - DNA, 4791 bp, Homo sapiens
acctcaaatattgctttagggtcatcattttctaaagaatcaggaaaaaaacagagaatgaaaggagttcagcaaggtattgaacagagagttaaaagttttaatgttggtcgtggacgtggcttgccgaagaaaatcaaacgaaaagaacgtgggggaagaaccaataaagggcctaatgtgttttcagtatcggatgactttcaagagtataataaaccagggaaaaaatggaaggttatgactcaggaatttattaatcagcacacagtggaacacaaaggaaaacaaatctgtaaatacttcctggaagggaggtgtattaagggagatcagtgtaaatttgatcatgatgcagagttggagaaaagaaaagagatctgcaaattttatttacaaggatattgtaccaaaggagagaactgcatttatatgcataatgaatttccatgcaagttctatcatagtggagcaaaatgttaccagggagacaactgtaaattttcccatgatgatctaactaaagaaacaaagaaacttttggacaaagtgttgaatactgatgaagaactcataaatgaagatgaaagagaattagaggaacttagaaagcgtggcataactcctcttcccaaaccacctccaggggttgggcttctgccaacccctccagagcattttcccttttctgatcctgaagacgattttcagacagatttctctgatgattttaggaaaattccatctctttttgaaatagttgtaaaacctactgtggatttagcgcataaaattgggaggaagccaccagcattttataccagtgcctcaccaccaggaccacaatttcagggaagcagtccacaccctcaacatatctatagttctgggtcaagtccaggtcctggacctaacatgtctcagggacacagtagtcctgtgatgcacccaggctcccctggacatcacccatgtgcaggacctcctggtctaccagtgccacagagcccacctttaccacctggtccacctgaaattgtaggtcctcaaaatcaagctggagtgcttgttcaaccagacacatctttgacaccaccaagtatgggtggggcttaccactccccaggctttccaggacatgtgatgaaagtacccagagagaatcactgttctccaggctcatcataccagcaaagtcctggtgaaatgcagctcaacaccaattatgagtccctgcaaaacccagctgagttttacgataattactatgcacagcattctatacataattttcagccacccaataactctggtgatgggatgtggcatggtgaatttgcccagcagcagcctcctgttgttcaagactcacctaaccatgggagtgggtctgatggcagcagcactaggacaggccatggccctctgcctgtaccaggcctcctccctgcagtgcaaagagctctttttgtaagacttactcagagataccaagaagatgaagaacaaaccagcacccaacctcatagggcaccaagcaaggaagaagatgatacagttaactggtattccagtagtgaagaggaagaaggaagcagtgtcaaatcaatactgaaaacattacagaaacaaacagaaactttaaggaatcagcaacaaccttccacagaactcagcactcctactgatccaagacttgctaaagagaaaagtaaaggaaaccaagtggttgaccctaggcttaggactatcccaaggcaagacattagaaagccttctgagtctgccccactggatcttagacttgcgtgggatcccaggaaattgagagggaatggaagtggtcacataggctcttctgttggtggagcaaagtttgatttgcatcatgcaaatgctggcactaatgtcaaacacaaaagaggcgatgatgatgatgaagatacagaaagagaactgagagaaaaagctttcttaatacctttggatgcctcacctggcataatgctccaggatccaaggtcacaattgagacagttcagtcacattaaaatggacattactctaaccaaacccaactttgcaaaacacatcgtgtgggctcccgaagacttacttccagtacctttacctaaacctgatccagtgtcttcaatcaatttacctctgcccccacttatagctgaccagaggctaaatagattatggaatacaaaaagtgatcttcatcaaaacacagtgtccattgatccaaaattagcagccaaagccaaaattaacacaacaaacagagaaggctacctagaacaatttggagactcacacggttcaggagctaaattaggagatcctagactacaaaaaaattttgatcctaggcttcacagactgcccaatacagagtctcatcaagtggttatgaaggattcacatgcatcaaagggtgcccctcacttacccagatcaaaccctggttcatcacagccctcaggggcaggaactagcaattctggttccggggctctgcctccatatgcccctaaactctcttcctcagctggccttccactgggaacttccacttcagttcttagtggtattagtttgtatgaccctagggatcacggttcatcatccacatcagagctagcaacagcttcttcaggagaaaactcaaagaaccagaaaaaaagtggtggcttaaaaagtagtgacaaaactgaaccttctcctggagaagccatccttccacaaaaacccagtccaaacgtgggagtcactcttgaggggccagctgacccacaggcggacgtccccagagttctggtaaggttcaggtcccagcagtgcacagccttcctgttcaggcattaacaggcttaattaggccacagtacagtgatccaaggcaggcaaggcagccaggacaggggagcccgaccccagataatgatcccggtagagaaacagatgacaaatctctgaaagaggtttttaaaacttttgatccaaccgcttcaccattttgttagctattgtgtaactgagcaattcttttcactcttgtgactatctcagtcctctgctgttttgtaactggtttacctctatagtttatttatttttaaattataaacacttttcagctgctagtatcagaaccacatgaagttatagcctctaaagcctgtggtattttatataatatttttataactttaagagactgtagtaattgacctaaaaacttatgttagcttcagtaaaagtacttttattgtaaataaacaatcatgaactcaacactctgcctgaatatatgccagttgtctttcataatcaatgtttagataaatgattgccactttttatatggttgtttagtttcaagcaatatgatgtacattacttttgagaaacagtattttgactaggacctctcttatttgtcagcacagaactgattaatatgtaatgctacctgctaattaaaatgtaaaatcaagtaaagaaaacattttaaaattacaattagcagagcagttcatgtttaagggcatcacttttattagtattggcaatattatttgtgtaaatgaagcatttgaatgtcatatctttttaaagtattttattgtatactgtatcatagaagttggaggtatataaatagaacattttgctaaagtgaaaaatttccaagttctctagcataactttttacatttaatttttcatatgaaatagcaattagttactgctgtgttacattgtgatgtttatgtatgtcaatgtttttgtctttaacagcataatttatattgctttttcaaatgatgtagctgcattaattgtgttcatcatgactttggcgatttttaacaaaatttttaaagacccagtgagagtctgtagtgattattacacggataatgttttaaatgtctaggttctgtatttttttcttaaatagcaagaaaatacagattgctagtatagtcaacagtatttggctatcaataaagaatctctttaagatctcacccggctggcattctgtaacagaggggattacctggtgttttaagtatttaatgtcctcatagtgtggaaatcccctaaattgattagaaattgtattttatgaaaaataacttgtattcattcttgtgtatttattacaatatataaataatggcaactctttgttttatacatatataatttataactgaatctaagtattagactgctactcatattttgaactgcaggtgtaggacagtgtttgctggtaacaactccagtgtgtattaataacttgaaaaggagcatttcactataaaagataatgaagtaggtaatgaaatcagtccttgaatgaaagcagtgcccttgagaagggatttttttttaaatatacagtaaaatatttcgtgggaacctaacactcacatagcatatggtttattaataatgcatatcctttctaatcacttcttcaattctttttgctgcagttctgtgctaaaatggggttgtggttaagtgaacgagaactctgcctacctaagaagttcattgtgttctaagtggaaggagagttactgaagggaatgtgaatttttaccgtttgtacttaagatacattggttgtctaaaatggctctggataacatttttgggttaaaaaatgtaatttaaagccaccatagaaagtattttctgatttactgtccaaatgaattttgttgttaattgagaagtcaataaaatggattaaactgacag

SEQ ID NO: 244 - DNA, 60 bp, Homo sapiens
taagtggaaggagagttactgaagggaatgtgaatttttaccgtttgtacttaagataca

SEQ ID NO: 245 - DNA, 2824 bp, Homo sapiens
ggcacgaggaggaagcggaggaaggtgaagtaggaccgaattcctgtgccgaagaggcctgcagtgggagagcaggatgggggctccggaggtggcgcccaggctctgagctaccctaggtctgcagactagcgggcattggccagagacatggcccagccactggccttcatcctcgatgtccctgagaccccaggggaccagggccagggccccagcccctatgatgaaagcgaagtgcacgactccttccagcagctcatccaggagcagagccagtgcacggcccaggaggggctggagctgcagcagagagagcgggaggtgacaggaagtagccagcagacactctggcggcccgagggcacccagagcacggccacactccgcatcctggccagcatgcccagccgcaccattggccgcagccgaggtgccatcatctcccagtactacaaccgcacggtgcagcttcggtgcaggagcagccggcccctgctcgggaactttgtccgctccgcctggcccagcctccgcctgtacgacctggagctggaccccacggccctggaggaggaggagaagcagagcctcctggtgaaggagttccagagcctggcagtggcacagcgggaccacatgcttcgcgggatgcccttaagcctggctgagaaacgcagcctgcgagagaagagcaggaccccgagggggaagtggaggggccagccgggcagcggcggggtctgctcctgctgtggccggctcagatatgcctgcgtgctggccttgcacagcctgggcctggcgctgctctccgccctgcaggccctgatgccgtggcgctacgccctgaagcgcatcgggggccagttcggctccagcgtgctctcctacttcctctttctcaagaccctgctggctttcaatgccctcctgctgctgctgctggtggccttcatcatgggccctcaggtcgccttcccacccgccctgccgggccctgcccccgtctgcacaggcctggagctcctcacaggcgcgggttgcttcacccacaccgtcatgtactacggccactacagtaacgccacgctgaaccagccgtgtggcagccccctggatggcagccagtgcacacccagggtgggtggcctgccctacaacatgcccctggcctacctctccactgtgggcgtgagcttctttatcacctgcatcaccctggtgtacagcatggctcactctttcggggagagctaccgggtgggcagcacctctggcatccacgccatcaccgtcttctgctcctgggactacaaggtgacgcagaagcgggcctcccgcctccagcaggacaatattcgcacccggctgaaggagctgctggccgagtggcagctgcggcacagccccaggagcgtgtgcgggaggctgcggcaggcggctgtgctggggcttgtgtggctgctgtgtctggggaccgcgctgggctgcgccgtggccgtccacgtcttctcggagttcatgatccagagtccagaggctgctggccaggaggctgtgctgctggtcctgcccctggtggttggcctcctcaacctgggggccccctacctgtgccgtgtcctggccgccctggagccgcatgactccccggtactggaggtgtacgtggccatctgcaggaacctcatcctcaagctggccatcctggggacactgtgctaccactggctgggccgcagggtgggcgtcctgcagggccagtgctgggaggattttgtgggccaggagctgtaccggttcctggtgatggacttcgtcctcatgttgctggacacgctttttggggaactggtgtggaggattatctccgagaagaagctgaagaggaggcggaagccggagtttgacattgcccggaatgtcctggagctgatttatgggcagactctgacctggctgggggtgctcttctcgcccctcctccccgccgtgcagatcatcaagctgctgctcgtcttctatgtcaagaagaccagccttctggccaactgccaggcgccgcgccggccctggctggcctcacacatgagcaccgtcttcctcacgctgctctgcttccccgccttcctgggcgccgctgtcttcctctgctacgccgtctggcaggtgaagccctcgagcacctgcggccccttccggaccctggacaccatgtacgaggccggcagggtgtgggtgcgccacctggaggcggcaggccccagggtctcctggctgccctgggtgcaccggtacctgatggaaaacaccttctttgtcttcctggtgtcagccctgctgctggccgtgatctacctcaacatccaggtggtgcggggccagcgcaaggtcatctgcctgctcaaggagcagatcagcaatgagggtgaggacaaaatcttcttaatcaacaagcttcactccatctacgagaggaaggagagggaggagaggagcagggttgggacaaccgaggaggctgcggcaccccctgccctgctcacagatgaacaggatgcctagggggacggcgatgggcctcacgggcccgcccagcaccctgagaccacactgttgcctcccagtgaccctgctgggacaccaggacaaggaagacagtttcgcctctcgaaagccgcagctgcgcctaggctggagctggaagggtgggtgaatccggcttgggcatccccaatgaactctgccctgcctgggactctatttattctgattaaaggggttttgcaaatgggaaaaaaaaaaaaaaaaaaaaaaaaaa

SEQ ID NO: 246 - DNA, 60 bp, Homo sapiens
ggtgaggacaaaatcttcttaatcaacaagcttcactccatctacgagaggaaggagagg

SEQ ID NO: 247 - DNA, 2434 bp, Homo sapiens
cccaaggccgcggccccgacgctgggcccgggagcggtccccgcgcacagcgcccggacgcgtaggtcccgaagtaggcccgcgctttgcttcgtaactggggatctctgaggacatcttagttctgaccttgtggaggccgcgtctctgctgcgtgttcgcgggccagtcgggccactttgtagaaatcatagccctctaaatcaagggacgaacgctgctggctggagtttgctggacactttcattccacctcctaacaaagagaattcctattccttgaggtcccttggggcagcagttaaagactacacgatccaggagcacctaggacctggggccaccttcctgcccgctttattggatggagcactgcctccccagtttctgggacaccttggggtgtggccttggtgagtgaaacttggggtgctgcctgctgggaaggaaatccggaaacgcagagaggactctctggtggtgacccaggccttgtcagatctgagattcttggaatctcagattgtgggggtgtggatggtgaatgaatttgggtatgcccccctttaccccagaactgaagaggaagcaaactacttgccacacttgaggctgcatgactattcagagaagggaggagccacttctgaattcagagtaggactgcatcaccaggcaaatacctgttctgagccagaaagactctggcttctgaggagatcctgagagtctgagtagtgccaggaagcagcctcagaatttgggggcccattacacaccccagccatgttcctgcgacggcttggtggctggctacctcgcccttggggccgccggaaaccaatgaggcctgacccgccttacccagaacccagacgggtggacagctcctcggagaattcaggaagtgactgggatagtgccccagaaaccatggaagatgtggggcatcccaagactaaggactcgggggcattgagggtttctagggctgcttccgaaccaagcaaggaggagccccaagttgagcagctagggagcaaaagaatggattccctcaagtgggaccagcctatctctagcactcaagagtctgggagactggaggctggaggggccagtcccaaactcagatgggatcatgtggattcaggtggcaccaggagaccaggggtgtcccctgaaggggactcgagcgtccctgggccaggagccccattggagaaacctggtaggcgtgagaagctgttgggctggctgcggggggaaccaggagctccctcccggtacttggggggcccagaagagtgtctgcagatctccaccaacctgaccctgcatcttctggagctgctggcctctgccctgctggccctgtgctcacgaccactgcgggcagccttggacacactgggcctgcgtggaccgctgggcctctggctacatggcctactgtccttcctggctgccctgcatgggctccatgctgttctgagcctacttactgcccaccctttgcacttcgcctgcctctttggtctcctgcaggccttggtgctggctgtcagctccgggagcccaatggggatgaggcggccactgactgggagagtgaggggttggagagggaaggtgaggagcagaggggagacccgggaaaggggctgtgaccgtggggtgggggcaaagggtgaagagagtgtgggctttaggagaaaagtgtgaggcatgacccaaattgtaagcatagggacctcagggatggggaagaaacccgagtacgaggtgcagggccccccttcatacacaggagagaacagaactatttagggtgtttgtgtttatggacagtgagggcactgctcttggacttcaccagctgttatttttgcttttacttttctcccaccttcagttttttttttttttccacctccactttttaaaagcaaaaaaaaaaaaaaagtatgatggtggtgaataaagaccaaagggtcctctctacctttgaaaactctcctggggtggaggagaccagggcaggatagacagacctctgcagtaagagagtggttgggaaacccagggtgttccttggatctcaggatctgagccatcgagggaagagtggggctgctaggcaagtggattaggggctggatagggccccacaggtgacagggagcctgcagggcggatctggtgatcatgggagccagagggagtggggacagtgcaggcagtattggcaggagggccagtgcagaaaggctggtagctcaggcagtgtgggggaagcactgaagcctgtagtccccacttgggggctaggggtttgctcactcagcaataaataactgtgtcacatcaaatcctaaatataccactacaaagtgagagttactgccactctgttcttactgacaccgtccag

SEQ ID NO: 248 - DNA, 60 bp, Homo sapiens
taaataactgtgtcacatcaaatcctaaatataccactacaaagtgagagttactgccac

SEQ ID NO: 249 - DNA, 1584 bp, Homo sapiens
tttaaaacaaaaatttcctgcgtgaaattctggcttagttaactttttggtctttctctcggggcttttcttgttcttataaaatactgtaaattacaaatggaaatttaatgcagaattaaatttctagtgtacaatatttgtaagacaagaagaaaatttccttttcccagatctcaggaactaccttgttcctgttaacttcttgaactggctagttgctcaaaggtatgtatacaggcctttagggaagagcagtttttaaaattttcctttctgatcattatatacctgtcagatgacaatagataatcttccaaagttgctacctaaaaatcctaggaaagaaactttggtgaacatgactgccattcccattaattgctaatgaaaaacatcagacttgcttagtagaaaaacacctaatttggtataactttcttgcagtttatccatattatgtgcttgttacttaatgtaattaaaagcattttaaaattctacttttttcgtatccactttttatacttgctacttcctaaatcctccctcactgtttatttcatccatctactcatttcccatcatccaaagttagcctctccttgtataccaggcactgtctgatttccatgtattccttttatttttactgtgggcctttgtgcttagtatacttttacttcatataatgtgattaacaaatgaagtgattatcatatggagtttaaggaaattagatgtatcttgcaattactttgaaatctttgggaaaccttaagaagattgtatctgttttcatttttatttacaacatcttggaatttgttcatgatttcctaaaatttctttgcctacccacatctctgtgaaaattttccatatcagttaagtagttttcgcaatgaaaattttagaccatagatatgttgtatgctgtgatcttttgcagcctaatgtttgaagggagcatgatgcagagaggttttgttaaaatcattttagcccaaagctttgtgtaattttcctgcaactttgattttgatttctttctcaaatagacttttttaatgtttagaaaagttggaggtcaatttatgatgtgattcaagttttagatttatttgctattttcaaagttttttttaatagtcttctctttttccagcagagagagatcatcattgcctgaatttagctttgtgactgcaagagcaagaccagttcctgtctggagacgactgttacaataatatcatcctattattttatgttcactctttatcaatttgaacagatgtttacatgtactataattagcattttatctctacagttctctaagagtacatctgagtccaaagtgtatctgaatgtgtgctctgaccttattcttaaatgttttctccccatactttatagccatttattttttaaacaccttaagaaggaacgaaaaagttctcttggatgacgtatattcaagtctgagccaaattgaggattgtgtctaggaaatctgtaaagccatactactgtgttcattagcatgagcaatttaaaatgaaaatgaattaaaaagtt

SEQ ID NO: 250 - DNA, 60 bp, Homo sapiens
tttaaacaccttaagaaggaacgaaaaagttctcttggatgacgtatattcaagtctgag

SEQ ID NO: 251 - DNA, 2881 bp, Homo sapiens
acagaagtgctagaagccagtgctcgtgaactaaggagaaaaagaacagacaagggaacagcctggacatggcatcagagatccacatgacaggcccaatgtgcctcattgagaacactaatgggcgactgatggcgaatccagaagctctgaagatcctttctgccattacacagcctatggtggtggtggcaattgtgggcctctaccgcacaggcaaatcctacctgatgaacaagctggctggaaagaaaaagggcttctctctgggctccacggtgcagtctcacactaaaggaatctggatgtggtgtgtgccccaccccaagaagccaggccacatcctagttctgctggacaccgagggtctgggagatgtagagaagggtgacaaccagaatgactcctggatcttcgccctggccgtcctcctgagcagcaccttcgtgtacaatagcataggaaccatcaaccagcaggctatggaccaactgtactatgtgacagagctgacacatagaatccgatcaaaatcctcacctgatgagaatgagaatgaggttgaggattcagctgactttgtgagcttcttcccagactttgtgtggacactgagagatttctccctggacttggaagcagatggacaacccctcacaccagatgagtacctgacatactccctgaagctgaagaaaggtaccagtcaaaaagatgaaacttttaacctgcccagactctgtatccggaaattcttcccaaagaaaaaatgctttgtctttgatcggcccgttcaccgcaggaagcttgcccagctcgagaaactacaagatgaagagctggaccccgaatttgtgcaacaagtagcagacttctgttcctacatctttagtaattccaaaactaaaactctttcaggaggcatccaggtcaacgggcctcgtctagagagcctggtgctgacctacgtcaatgccatcagcagtggggatctgccgtgcatggagaacgcagtcctggccttggcccagatagagaactcagctgcagtgcaaaaggctattgcccactatgaacagcagatgggccagaaggtgcagctgcccacagaaagcctccaggagctgctggacctgcacagggacagtgagagagaggccattgaagtcttcatcaggagttccttcaaagatgtggaccatctatttcaaaaggagttagcggcccagctagaaaaaaagcgggatgacttttgtaaacagaatcaggaagcatcatcagatcgttgctcaggtttacttcaggtcattttcagtcctctagaagaagaagtgaaggcgggaatttattcgaaaccagggggctatcgtctctttgttcagaagctacaagacctgaagaaaaagtactatgaggaaccgaggaaggggatacaggctgaagagattctgcagacatacttgaaatccaaggagtctatgactgatgcaattctccagacagaccagactctcacagaaaaagaaaaggagattgaagtggaacgtgtgaaagctgagtctgcacaggcttcagcaaaaatgttgcaggaaatgcaaagaaagaatgagcagatgatggaacagaaggagaggagttatcaggaacacttgaaacaactgactgagaagatggagaacgacagggtccagttgctgaaagagcaagagaggaccctcgctcttaaacttcaggaacaggagcaactactaaaagagggatttcaaaaagaaagcagaataatgaaaaatgagatacaggatctccagacgaaaatgagacgacgaaaggcatgtaccataagctaaagaccagagccttcctgtcacccctaaccaaggcataattgaaacaattttagaatttggaacaagcgtcactacatttgataataattagatcttgcatcataacaccaaaagtttataaaggcatgtggtacaatgatcaaaatcatgttttttcttaaaaaaaaaaaaaagactgtaaattgtgcaacaaagatgcatttacctctgtatcaactcaggaaatctcataagctggtaccactcaggagaagtttattcttccagatgaccagcagtagacaaatggatactgagcagagtcttaggtaaaagtcttgggaaatatttgggcattggtctggccaagtctacaatgtcccaatatcaaggacaaccaccctagcttcttagtgaagacaatgtacagttatccattagatcaagactacacggtctatgagcaataatgtgatttctggacattgcccatgtataatcctcactgatgatttcaagctaaagcaaaccaccttatacagagatctagaatctctttatgttctccagaggaaggtggaagaaaccatgggcaggagtaggaattgagtgataaacaattgggctaatgaagaaaacttctcttattgttcagttcatccagattataacttcaatgggacactttagaccattagacaattgacactggattaaacaaattcacataatgccaaatacacaatgtatttatagcaacgtataatttgcaaagatggactttaaaagatgctgtgtaactaaactgaaataattcaattacttattatttagaatgttaaagcttatgatagtcttttctaattcttaacactcatacttgaaatctttccgagtttccccagaagagaatatgggattttttttgacatttttgacccatttaataatgctcttgtgtttacctagtatatgtagactttgtcttatgtgtcaaaagtcctaggaaagtggttgatgtttcttatagcaattaaaaattatttttgaactga

SEQ ID NO: 252 - DNA, 60 bp, Homo sapiens
tgggctaatgaagaaaacttctcttattgttcagttcatccagattataacttcaatggg

SEQ ID NO: 253 - DNA, 1348 bp, Homo sapiens
cctctccccccgggctccgcccaccccacgccgggaacccacgcgggccactacaagcccgccctttcctacgtctggtccagtcggtcttcctccggcccgggccctggcccagctagccggccatggaaggtaatggccccgctgctgtccactaccagccggccagccccccgcgggacgcctgcgtctacagcagctgctactgtgaagaaaatatttggaagctctgtgaatacatcaaaaaccatgaccagtatcctttagaagaatgttatgctgtcttcatatctaatgagaggaagatgatacctatctggaaacaacaggcgagacctggagatggacctgtgatctgggattaccatgttgttttgcttcatgtttcaagtggaggacagaacttcatttatgatctcgatactgtcttgccatttccctgcctctttgacacttatgtagaagatgcctttaagtctgatgatgacattcacccacagtttaggaggaaatttagagtgatccgtgcagattcatatttgaagaactttgcttctgaccgatctcacatgaaagactccagtgggaattggagagagcctccgccgccatatccctgcattgagactggagattccaaaatgaacctgaacgatttcatcagtatggatcccaaggtaggatggggcgccgtctacacactatccgaatttacacatcggtttggcagtaaaaactgctgaacttggtctcaagatgtggaactgtggagaaattctaggacatgaacaagctatcctttcatcgaggacagcaaacattatggtacagttggcttggaattatgtctttctcttttaatttgattgagtggaaatctgagtgaatacaaatataaatgaacaacataaaaacttttgttttgacatgtcaaattgaaacttgataaagtgcgtacttgctaagatattcctgtggctcatgcgttacaacacgaggacttaagccagtaatcgtttttgttcagatagaggtgtggaggtagagccagcccctcatgtctgttttggatgttttgtgtctctccagctacattgtaagttccttgagggcagggccatggcccattgctctgtgaatctcaaatgcccataaaaggtgcccataaaatgttttcttgaacatttgaatgtgctgttgtctggaaaggggtaatattgtgagctgaatcagcaataagtattagtctttttggactatggtattgttaaaaagactgcagccctctcagacttgagcgttaattggcttatttatttatggctttaaataaaatcgatttaacgtt

SEQ ID NO: 254 - DNA, 60 bp, Homo sapiens
gctgaatcagcaataagtattagtctttttggactatggtattgttaaaaagactgcagc

SEQ ID NO: 255 - DNA, 4666 bp, Homo sapiens
cgagactcagccagaggagtacggattaaggggccgaagaaagaggagtgaggcaggggagcgaggcggacgctccgagcgcatcggactcacctgggccggcggcgagcggcgagtacgagtggactcttgccctccgcagcatgcgccccgcctgctaagtcgccgccgtctcgccctcacctagcaccgccaatcccgcctggatggagtcccctctagggttcccattggctcctgtgagtgcttgggtgttcgggagcctgtttttggcggaggggaaccaacttttgaagttcgcccagaagactgcgttccagccccagttccccggcagcgggacccggcgaagacgcgaccgcggcgcgagtcaccatgggaagcaaaggtgtctaccagtaccactggcaaagccacaatgtcaagcacagtggtgtggacgacatggtgctactgtccaagatcacagagaactccatcgtggagaatctgaagaagagatacatggatgactacatttttacatatataggatctgtattaatctcagtcaaccctttcaagcagatgccatattttggggaaaaggaaattgaaatgtaccaaggagcggcacagtatgaaaacccaccacatatctatgcccttgcagataatatgtacagaaacatgatcattgacagagagaaccagtgcgtcattatcagtggtgaaagtggtgctggaaaaacagtggctgccaaatatatcatgagctacatctccagagtgtctggaggagggaccaaagtccagcacgtgaaggacattatcctgcagtccaacccgctgctggaggccttcgggaacgccaagaccgtccggaacaacaactccagccgatttggaaaatactttgaaatccagttcagtccaggtggggaaccagatggtggaaagatctccaacttccttctggaaaaatctagggtggtgatgaggaacccaggagagcggagttttcacatattttaccagctcatcgagggcgcctctgcagagcagaaacacagccttggcatcaccagcatggactattattactacctgagcctctcgggctcatacaaggttgatgacattgacgacaggcgggagtttcaggaaactctgcacgccatgaatgtgattgggatctttgcagaagagcaaacgctggtgttgcagatagtggcgggtattctccacctgggaaacatcagcttcaaagaagttggcaactacgcggctgtggagagtgaagagtttttagcttttcctgcatatctgctagggataaaccaggaccggttgaaagaaaagctaacaagccggcagatggatagcaagtggggaggcaaatccgaatccatccacgtgaccctcaacgtagagcaggcctgttacacccgggatgcgctcgccaaggccctgcacgcccgggtctttgatttcttggtagattccatcaataaagccatggagaaagaccatgaagaatacaacattggcgtcctagacatctatggctttgaaatattccagaaaaatggctttgaacagttttgtatcaattttgttaatgaaaaactgcagcagatttttattgaactgacattaaaggcagaacaggaagaatatgttcaagagggaataagatggacacccattgagtactttaataataaaatcgtatgtgacctcatagagaacaaagtgaaccctcctggcatcatgagcatcctggatgacgtgtgcgccacgatgcatgcggtgggtgagggggcagatcagacgctgctccagaaacttcagatgcagattgggagtcatgagcacttcaacagttggaaccaaggcttcatcattcatcattatgctgggaaggtatcctatgacatggatggcttttgtgaaaggaaccgggatgtgctttttatggatctcatcgagcttatgcagagcagcgagctgcctttcataaagtctttatttccggaaaatctgcaggctgacaagaaagggcgcccaactactgccggaagcaaaataaagaaacaagccaatgaccttgtgagcaccctgatgaaatgtacgccccactacattcgctgcatcaagccaaacgaaaccaagaagcccagagactgggaggaaagcagggtaaagcatcaagtcgaatatttgggtctgaaagagaacattcgagtgagaagagctggctatgcctatcggcgcatcttccaaaaattcctacagaggtatgccattctgaccaaagccacctggccttcttggcagggagaggagaagcaaggcgtcctgcacctgctgcagtcggtcaacatggacagcgaccagttccagctggggaggagtaaagtgttcatcaaagcccccgagtctctatttcttttagaagagatgagagagagaaagtatgatgggtatgctcgagtgatacagaaatcatggaggaaattcgtggcccggaagaaatacgttcaaatgagagaagaagcctcagacctcttattgaacaagaaggagagaaggagaaacagtattaacaggaactttataggggattatattgggatggaagagcacccagaactccagcagttcgtgggcaagagggagaagattgatttcgcagacacagtcaccaagtatgacaggaggttcaagggtgtaaagcgagacctgctccttaccccaaagtgcttgtacttaatcggacgagaaaaagtcaaacagggcccagacaagggcctggtgaaagaagtcctgaagcggaaaatcgagatagaacggatcttgtctgtgtccctcagtactatgcaggatgacatttttattctccatgagcaagagtatgacagtttgcttgaatctgtcttcaaaactgaattcctaagcctcttagcaaagcgttacgaggagaagacccagaagcaactacctctgaaattcagcaatacgcttgaactgaagttgaaaaaggaaaactggggccctggagtgcagggtgcgggctcccggcaagtgcagttccaccaagggtttggggacctggctgtcctcaagcccagtaacaaagtgctgcaggtcagcatcggacctggactgcccaagaactcccgtcctaccagaaggaacactacccaaaatacaggttattccagtgggactcaaaatgccaactacccagtgagagctgcccctcctcccccaggataccatcagaacggagtcatcagaaaccagtatgtgccatatccccatgctcctggaagccagaggtccattcagaaaagcctgtacacctccatggcccgcccgcccttgcctcggcagcagtctaccagttcagaccgagtgtcacagacgccagagagcctggatttcctcaaggtcccggaccagggagctgcaggggtcaggagacaaacaaccagtcggcctcccccagctgggggcagacccaagccccagcccaagcccaagcctcaggttccacagtgcaaggctttgtatgcctatgacgctcaggacacagacgaactcagctttaatgccaatgacattattgatattatcaaagaagatccttctggctggtggacgggtcgactacgaggcaagccagggctgttccccaacaactatgtgaccaagatctgaggtgcccgtgactctgacacatggggcagaggagctccaggcacagaccaggtgaggggatatttaggtgctccccttacaatccacaatgagcaattgcttctccaaggcctggagctattctggtaccttccccatggaggacactgaaaaggctgggttggggacagggagtatcactccataagtgatcctaaaaggtagcctcttcataggaaccaggaggacaaaaccaccatgcattaagatttatttattgtatttaaacctggtgagaggacaagtgaggtctgctcagaccttgtaggcttctatcaaaacagcaccctgcttgctcaccaggcctagagaatggctgtaggtggcggctgagaagtgcctttagttgaagagcacatttctttcatctctcttgtctatacctgatagacacattcctctctgccaccttccttcagggaggacccgccctctgcagactgggcttagcgtgagcaggcacttcccatgtacgtgccaagggtaagctggcctgctgagcccagggcgacagaggggcactggtttacactttgccgggaccatcagggccgccaagcaggtcaggggctgggggctggtcctgctggctttgatttctctgggtcttcaattagaatgtggctgggcccatattggtttgtgttaaatgctgtacttactacaagaatcttttttcaagcatgtacatttataaaaacaggatcatatactgtatatataaaaatcttgagatggtagaaacatgtatgaatgtactaagtagtattccactgtactcattcataaggtaggttttcttacaaaactcacaccaggtacttaaagatgtgctctgcttttttccaactacggagtgtcactgctttctaggtcagtccctgcagactcttctcaactctttccctataggaaacttact

SEQ ID NO: 256 - DNA, 60 bp, Homo sapiens
gtactaagtagtattccactgtactcattcataaggtaggttttcttacaaaactcacac

SEQ ID NO: 257 - DNA, 8275 bp, Homo sapiens
tacattctttgagcctggtggagcacgtttgctgaggtgatgtggtctcctcagtgtcactgtgaagagctcagtcaggaaaagccagcagcatctaccctgccaccctccaaaccttctgactttggggagactccagtcccccaggtctttacccagcctgcagatctcattctagcttaacaagggcatgcgtgtgcatgaagttgaactaagagtggaggaaggccagaggtagggatgggtgtgatactaggtagcagatattacagacttctgaatgcattcagatttccaaagggtttcctgagacctctcaaccaatctttctaggacaatagctagtgtaggggtctcctgactcaataggggacccaggccttcagataccagccactcactggctgctctgtgacgtgctatcttaagaccgtgaatggaagacaagccctatgtaaacacaaatcttaaagccactgttggctactcgagggcctccttgtgctaatatcttttgttggatattatttcaaaatatgtgaattttagacccttttgtggttgcctttgctgccgcttgttaagggcaaaataaaaacgcaagaaattcttttagcatgaagaaatacatttaatgagctccagaactcaaaataaatggcttcagctccttgaacagtcatctgtatgccattgacaatattttattagataggcgtttaattagaggaagtctgtgggccagattcttccctgcatgtgtgattcatatttggaaatttctgatttatctccccccaattgtgccatgtggcctgcacttaaaatgtaagtaattctgattttattctcaagaacttatttgaagattcaagccaagcaatgctgaaaaaagctaggcctgcaaaactaaaacatagcacgagcctctcaaaatttccaccaaatatacaaaatccagtctgctctgaatgcgcatcagaaactcaactttggttattagccctggaatttggtgccaaaaacaaaaatttggttttgttgtcaagcaatttctaaaggaagaaacaatgtaaatattaatctgtcattttaaatgttgttgaaactgccatgagtgtgcacacagctctctgtttcatacctgtaatcagtattcgcatgctctcagtccactgtttctacttaaagcattattccgtatttcagcacagaatgactttggtgaaactgtagctgttagtgagtaattgcgttacaggcagacccagtcttaaattaacaaatctgggttcccttaactatcaggtttatgttggttttatttgcttctatctggatcccttccctttgcctgggaccttattctgattagctagatttttaagagcttttaaagttacattccccagaaagacattttttctctggactttctcttttatggtctgtaaacatttctcctctgatggtcatggacttagttctaagactggccttcctctagtgtgatggtatgagtctattctattgctgctaaattttacaaattgaactgcagaagagtctttctaggtaatccctgtaacagagcaagtttctttgaaccctagccatgtatgtgtagtgttccattattggaacgctaagcatgtgggagttatttatatcttactgctcacggtcatcatcaaggtctgattacaaaaattcaaaaaattacaaccttaggcataaatttaaagaggtggccatttaaaaataatccgttgctaccatttccacttaaaatggtagctctctgatgagttttatattggctctctgttagccaagcccgtaagagcatatggagagaaaggtacgattgaatgaacttctgtgagcggcataaagacatttactctgacaacattaaagaatttactggtactgttttttttccttgttagtttaattccatctgtttctgtttaattgagtgaaacttaataaaaatggtgtctctagtgagcacatgtacacacctctcccagttgttgggatttaaaatgaagctgtgacttttaggccaaaattagcgtgacacttaatataacagttttctttctattaaaaaataatgacaaaacacacacacacacacacacacagacacacacacacacacacacacacacacacacacacacacacaatctgtatgatgatttggcctggagttgtagacatcacagatcaaaagtggcctggtgctagctgtttgggtatatccttgaaaagggcaactttgtcatttcctagagtaacctagagagagatttccaagcatttccccatgaacagaagtggtaaatgctgatttattgtgccatatgtgtgtttgggaggaggggagatagcgtcttgttttgaaaaaagttctcacttcataaaataaactgcacaccactccaaaaaaaaaaaaaagatgaaacctcaagcaggaggaacttttttatttaacccctagtgaaagcaattaaacgtcttggtagatgctagggaagaattagaaaatcttcttttcctgaaagctttaaacattgaatagactctgatttattcaggatcatttcggtgtagattggccactcgacacagacatcacagcatggtagcctcgaaaccaagccttcagcatcttctcggcgcccggtgttggagtgttacttggagtggaggcagtgcatttgcatcttcatgtagtctccagatcaggttactctgatttgtcttggagtggctttctgtttgaaagtagggaagattaaaaatcaacttgccacgggatatctgatctccatgagtagttgaaagccagtctaaaaggttaactctacagggccggcgccgccagtgcggtcatggaaaatcgtgctgtgagatactggagtgtgctgctggggccaggtgcagcaattgcagaatgttgaggagtgaggagtagttagaaatcactgcaacatggaaaagcacacagaccaaggacgctaaggagggagcgaggactaccgggcaggtgtgcgtgtgtggagtaaaatgcatcggacagtgattgactccacttttgagtgagatgtggaggcggtagtggtgtgggggttgtgagggagtgagtctgctttattatgaatcaggattgatagctggccttaaagtgggaaatgatagaagggtcacttaggagcctgcagtggcatggtgaccagtctgttattactcatagatgaccttttctggctcttgaaaccaagctaacgactcctttttcttctgggcctcaaagtttctttgtaggaagtaaagcatttgtcactttccctgcagtgatttattgaaagactgaagataggtcttccttagttaaggacgcacactggctgctcgctccagaagcaccaagaatggctgatggataaatcccttacccatactcctgtttctgcctcctaaggttgctgtgaaaacctaactaaccaaacctcaccagcttggcctatattattaatcaaattcccttctgttctctctgtgtgtatatttaatactgtagataatatgttttatttaaaatttctaatacaccaaattaatttgaaatagaaaaggctggggacttcattctcatttttgtcatttgtttaatcagtttgggaaaacattttccgttgttccattgtatgcagtgtcttgtcagcatgtacctatctaggagaaaacgctttgttttcagcgttctgtctttaccctcaaagcatggtgtagcttctgttcttacactgttggagcactgtctggtgtctttttttttttttttttaacactgctgaataccaatttgtacttggaatacctctttcctctagaatacagtgatcctattccccaaagtgcaagctttcatgtggaagcatcctaagtgatcgtcctgggtgatgccatatttcactaaagtgggaaaagaagaggtgaactttgctcttccaacaaggcttgcactttatactttgggcagtgcatgggagaaggggggcccttagaggtgagcaggatcactgtagctagaggagaggtctcactgaaacagaacgcatctgtgactgtagcttgcatggagagcctagacagccaaccatggatttgcctttatgttttgaatggaaacatctatttcaattgggatagaaacctttacctatgtcatatctgtaagagaatttagcttatagatatgtagatacgtgtgtgtgttgctgggtggggaagtgggtgggaatgtagaaaaggcctcacctgacttggtcccagttggcttctgatggccaaggagctgtttttcattttggtgggcacccaacatgtaggttctcacagatgctgtctggtttcttcttctctccatggcggaacaatgaagtacgtcaataaagcatggactcataccactgggaagaatgctggcttctccagtaacaatgagcttggtggttctttgagcatggaaggccaagctcatgtcacagtgtatgcacggtattaatatatctcttgttgatctaaactgaaggggcttttacttgtcctaacaggtatcatgctgtaaaaactgtccattgtaactgttctttcccactgatggctgaagctttgtcctgagtacaagatggtatttttcattggtacgaagcaccatgttcccaacccaaacactgcctccaccaccaccaccaccaccatcaccaccaccactgctactaccaacatcaccaccaccatcaccaccaccgtgttcaaacaaagcagcattctcctgtgtcttttcctcataagtaagaacaaggtagcacattcatttttccattagtgcatttcaattcttttcctgcaagttgcattgctattgcttttctgaattgcttgatgatgaactgtgaagctgatgcttagctgcttgtgaaacttttcttaaaggaactgggtctaagaagcacacatacattaccctcaacaacctcaggtatcaagaagaggaccacactgctaacatgggtaatcctataacctggcttttcttgtggaactttgtaatttctataaaataccgccagctttgcgtattccactgagccccaacttagatatcagacgctagtgagtcctgcctattcaggaagctacgtattattcagcataatactgcccttttttttgataactggctttcaaatgggataatctcaagagaggtttcgttgtatcctcttagagcgtatggatttaaatagagcctttcaaaaaaatagatgaaaacctacatctctaatatatttcctacttgggccttttgagcatattctgggcacatagagagaaaatctcctatgttttagaacagaataaaagaagacaaattatggtagataagtggcacccagaagattgcaaaataaataattttatgtgggggaatattgaagaaaaagcatagaaacttttttataattgcactttaaaattttggaaaagaaaaattgagaatgcaatcagtagtctcatttttgtcagtattctgtcagatattagctattcaataagcatatcttggattactatttttttagttgtcagtttttctagtttccccctttataggaaaaaataatacctatgtggttaaaaactgagacccatttaaaaaacaggacaggcacagttaagtactagaaatgccgtttttatcacttgaaaaatagattagaaatgtttttcttttcccagaattgtgtgagtttgtttcgaagccttgaataccggtacatggttaacaggcagcttgtgcccaatcccaaagcgggaagaaaggcctggctttggctcactgatgataaagtctcctcccactgcctttcagcagctctgccgaagagctgatcaagatgctgcaaacccagcttccccagaccggccaagagggaagaatgatgagcgtgttttaaattacaaagagagagcagcgcaggcagtttctggtctgggtgataaattgaaatccataaatatagcagtgctaatttgaagttccgtaattgtttgtgccatgagaatgtgtacatttgaaaggattttataaagcaattactagaaatgcctcccttgagagctgtatgactggaggtgttttcagtctgaggggggcagcataaacccaaacctcttctagatgaatggcagggtggcgggaggggtcacgaaatcatggggaagaggtgaaggatttgagagctactaacctgacatctaactgaatgcctaagaaattgcagggcaatttcaggaaataggaaaaataattttgaaaacattcaaagcctccagactttcggtgtgtgactgatcttttttctaatctctttaaacttctttccacctattgccttaataacaggtgcttcctcttagggtccccccaaattatttacctcgagttccctaatgaaattactttgcattaatttgtcataaagggagaagtgctagaaataccgaggcattgataatttcatggagtagcaatgaatgtcagtcacagtttcctctccccgttgcccggggctgtgccttcaaagcaggtgacagactgcaaggtgtaaacaagctttataatgccatataaatcaaaccgggctcattttacctaacaacagaaccatgtttgtttgcttttttgtaaaatggactacttcagtgaaaaattgattccacgtagttctaataactctgtgaccttggacattggctttttatagacacagctcttcccacctgctggtatggacaccagtttgtacagactgttgtcacacaccctggctcaaagtcaaaagagaattttaattactcatcaagctgccaaattctactaattgcccccttgtcagcatatttcattaattgctgaaaggtaaatgagttacatattttgtttggaccacgtcacctgtacattttcaaagcctcggattgtttatcttgcaaggagagaaggggcctcttctccacagatgcagctcaaattagcaaaactgaactgtagagtttcaggcctttcccttccttaaaatgctgatagatttctagaccagactttgatatttattggcttcttggtcttgctgtttaaacacacccattgccctttctttcttaggccctgtaagcaaagctggagtagcgtcttgggaaaaggccaactgaccaccctaattttgtcgttccaagtctgcagagcgcacatattaagtagttgttactgacatctttaggctccgtgagtgaaatgcagcaagcctgcccccagcagcctgtgggctaatcctgagctgttccttcgtttaggtacacaggtgaccctgaagttcccactcggccctctgttttctgagtcctgtctcctctgtagcacagtggggattgttctgaaccgtggcacgccttcttggcgaggcaggctctcttatggaaccatagtctgttacctcatttcttccaactgctctgtcccctaaatgtgtgttcccaggtgcagtgcagcaagggtgctcgctgttggcctttgagagtggaggtggctgtatcggagtgtgctccccctactttttcccttgccccgagtggcagttcttttcctctctgttgccggatgctgtctagggcctgttagttgctatttccttgcctccgctccccttcccactagccttctaactaccttttattctcggctccaactctttcaatgatgaggtgaatgctttttctgttccacgtcactgcaaagtcaaggtgtccagcatgctctcacttataactgcctcacccgatctcacgcacagtgcgagagctgaaggtaagccccggatgttgccagattacggtggacaaataaaaaacaactctccaacagcaactcacaaatgcatgaaatgttttaacctctagacagactgccagaatttctctcttctaattcctacttgtagtgataacatttttctttttgtgatttttttttttaaataatagtgtagtaccttgaaacaactgcagttctaactcattgtcaccatttctgtttgacacgttccacttcctttgcaattattgtatttagttgtgcactagtgtcaataaaattgacatttgtgaagcaaaaaaaaaaaaaaaaaaaaaaaaa

SEQ ID NO: 258 - DNA, 60 bp, Homo sapiens
taccttgaaacaactgcagttctaactcattgtcaccatttctgtttgacacgttccact

SEQ ID NO: 259 - DNA, 2895 bp, Homo sapiens
gaattccggtggcggagaccaaggcggcggcggcggacggggagcggcccggccccggccccctgctcgttggctgtggcagggccgccgtggggccggcccggctcccgccccccgcggctccccctccggctcctcctccggggagacgccgggggcctggcccggcccgcactcagactgctgctgcagccgccgccgggggagtcggaggcggtggcggcgccatgggcggcctggcctctgggggggatgtggagccgggactgcccgtcgaggtgcgcggctccaacggggccttctacaagggctttgtgaaggatgtccatgaagactctgtcaccatcttctttgaaaacaactggcagagtgagagacaaattccttttggggatgtccggctaccacctccagctgactataataaggagatcacagaaggggatgaagtggaggtttattctcgagccaatgaacaggaaccttgtggctggtggctggcccgggtgcggatgatgaagggagatttctatgtcattgaatatgctgcctgtgatgccacctacaatgaaattgttaccctggagcgacttcggccagttaatcccaatccccttgcaaccaaaggcagcttcttcaaggttaccatggctgtgcccgaggatctgagagaagcctgctccaatgaaaacgtccataaagagttcaagaaagccctgggagccaactgcatctttctcaacatcacaaacagtgagctcttcattctgtcaaccacagaagcccctgtgaagcgagcatctctgctgggtgatatgcatttccgaagcctgcgcaccaaactgctacttatgtcccgcaatgaagaagctaccaagcacctagagacaagcaagcagttggcagcagccttccaagaggagttcacagtgcgagaggacctgatgggactggcaattgggactcacggtgccaacatccagcaggcccgaaaagtacctggggtgaccgccattgagttgggtgaagagacctgcactttccgcatctatggggagactcccgaggcttgccgacaggcccgaagctaccttgagttttctgaggactcagtgcaagtgcccaggaacctggttggcaaagtgattggaaagaacgggaaagtgatccaggagattgtggataaatctggtgtggtgagggttcgagtggaaggtgataatgacaagaagaaccccagggaggagggaatggttcccttcatttttgttggcacccgagagaacatcagcaatgcccaggctttgctggagtatcacctctcctacctgcaggaggtagagcagcttcgcttggagaggctacaaattgatgagcagcttcggcagattgggctgggctttcgccctcctgggagtgggcggggcagcggtggcagcgacaaggctggatatagcactgatgagagctcctcctcctccctccatgcgactcgaacctatgggggcagctatgggggccgtggccgtggccggaggacaggcggtcctgcctatggccccagctcagatgtgtctacagcttcagagactgagtcagagaagagagaggagcccaaccgagctgggcctggcgacagggatcccccaacccgaggggaagaaagccggaggcggccgactgggggccggggtaggggacccccacctgccccccggcccacttcgagatacaattcttcatctattagctcagtgctgaaggatccagacagtaatccctacagcctattggacacgtctgaaccagagcccccggttgattcagaacctggggaaccccccccagcaagtgccaggcgccgccgctcccgccgccgccgcactgatgaagacaggaccgtcatggatggaggcctggaatcagatgggcccaacatgacagagaatggcctggaagatgaatcaagacctcaacgtcgtaatcgcagccgccgccgccgtaaccgtggtaatcggactgatggctctatcagtggagaccgccagccagtgactgtggctgactatatctcacgagcagagtctcagagccgccagagcgcacccctggaacgcactaaaccctcagaagactctctttcaggacagaagggtgactctgtcagcaagcttcctaagggcccctcggagaatggggagctctccgcccccttggagttgggtagtatggtgaatggggtttcataaaacctccaacctgcacccctcccttctccatctcgcttgctgcccaacaccatggccctcacaggcccaactgacctgcgctggagctgctcttatctaggggggaggggggtggcacagcagcttgggtaccccccaacctccaggagctagtggaggggtgtgtaacagggtcataccccctccctcttgtccaccctacccccagggtaaggggagcctctctccttccccatcagactggatgtgcctttatcctctaatgccccaatctctctctgaacacccccattctccacctgttggtggggggtgctcctcgacccacccagatttgaccgttcagggggcctcccctgctatccctcctcccatcctgtaccccccatttctggggcctcatcactgtggaagacggggatagtaagagataagtgggtgggaggcacggggaaggttttggagtagaaccaggggtgtgtatgaaggggggtgacaaggtccccctggggaggggaccaaccttgtctggtggatgagaaggcgtatttatttttcactgtacagtatttaaaaagagaataaaaaaatccaaatggcaaaaaaaaaaaaaaaaaaaaaaaaaaaaaaaaaaaaaaaaaaaaaa

SEQ ID NO: 260 - DNA, 60 bp, Homo sapiens
ccttgtctggtggatgagaaggcgtatttatttttcactgtacagtatttaaaaagagaa

SEQ ID NO: 261 - DNA, 1386 bp, Homo sapiens
gctcctcgccccgcgcctgcccccaggatggtccgcgcgaggcaccagccgggtgggctttgcctcctgctgctgctgctctgccagttcatggaggaccgcagtgcccaggctgggaactgctggctccgtcaagcgaagaacggccgctgccaggtcctgtacaagaccgaactgagcaaggaggagtgctgcagcaccggccggctgagcacctcgtggaccgaggaggacgtgaatgacaacacactcttcaagtggatgattttcaacgggggcgcccccaactgcatcccctgtaaagaaacgtgtgagaacgtggactgtggacctgggaaaaaatgccgaatgaacaagaagaacaaaccccgctgcgtctgcgccccggattgttccaacatcacctggaagggtccagtctgcgggctggatgggaaaacctaccgcaatgaatgtgcactcctaaaggcaagatgtaaagagcagccagaactggaagtccagtaccaaggcagatgtaaaaagacttgtcgggatgttttctgtccaggcagctccacatgtgtggtggaccagaccaataatgcctactgtgtgacctgtaatcggatttgcccagagcctgcttcctctgagcaatatctctgtgggaatgatggagtcacctactccagtgcctgccacctgagaaaggctacctgcctgctgggcagatctattggattagcctatgagggaaagtgtatcaaagcaaagtcctgtgaagatatccagtgcactggtgggaaaaaatgtttatgggatttcaaggttgggagaggccggtgttccctctgtgatgagctgtgccctgacagtaagtcggatgagcctgtctgtgccagtgacaatgccacttatgccagcgagtgtgccatgaaggaagctgcctgctcctcaggtgtgctactggaagtaaagcactccggatcttgcaactgaatctgcccgtaaaacctgagccattgattcttcagaactttctgcagtttttgacttcatagattatgctttaaaaaattttttttaacttattgcataacagcagatgccaaaaacaaaaaaagcatctcactgcaagtcacataaaaatgcaacgctgtaatatggctgtatcagagggctttgaaaacatacactgagctgcttctgcgctgttgttgtccgtatttaaacaacagctcccctgtattcccccatctagccatttcggaagacaccgaggaagaggaggaagatgaagaccaggactacagctttcctatatcttctattctagagtggtaaactctctataagtgttcagtgttcacatagcctttgtgcaaaaaaaaaaaaaaaaaaaaa

SEQ ID NO: 262 - DNA, 60 bp, Homo sapiens
ctgcccgtaaaacctgagccattgattcttcagaactttctgcagtttttgacttcatag

SEQ ID NO: 263 - DNA, 2920 bp, Homo sapiens
cttgcagcaatggcttggattagatccacttgcattctcttttttaccttgctttttgcccacatagcagctgtaccgattaagcatcttcctgaagaaaatgtacatgatgcagattttggtgaacagaaggatatttcagaaatcaatttagctgcaggcttggacctctttcaaggggacatcctcttgcagaaatccagaaatggcctgagagacccaaacaccaggtggacgttccccattccttacatcttggctgataatttggggctgaatgctaaaggagccattctgtatgcctttgagatgttccgtctcaagtcctgtgtggatttcaagccctatgaaggagagagctcatatatcatatttcaacagtttgatgggtgctggtctgaggttggtgaccaacatgtgggacagaacatttccattggccaaggatgtgcctataaggccatcatagaacacgagatcctgcatgctttgggattttaccacgagcagtcaaggacggaccgggatgattatgtgaacatctggtgggaccaaattctttcaggttaccagcacaactttgacacctatgatgatagcttaatcacagacctcaatacaccctatgattatgagtctttgatgcactaccagcctttctcatttaacaagaatgcaagtgttcccaccatcacagccaagatccctgagtttaactccattatcggacaacgcctggatttcagtgccattgatttagagaggctgaaccgaatgtacaattgcaccacaactcacactcttttggaccactgtacttttgagaaggcaaacatctgtggaatgattcagggcaccagagatgacactgactgggcccatcaggacagtgctcaggctggagaagtggatcacaccttgttgggacaatgcacaggtgccggctacttcatgcagttcagcaccagctcggggtccgcggaagaggcagccctactggagtctcggattctttacccaaagaggaagcagcagtgcctgcaatttttctataaaatgacgggaagtccttcagacagactcgttgtctgggtcaggagggatgacagcacaggcaatgttcgcaagttggtgaaggtgcagacttttcaaggagatgatgaccacaattggaaaattgcccatgtggtgctcaaagaggaacagaagtttcgctaccttttccagggcacaaaaggcgaccctcagaactcaactgggggaatttacctagatgacatcactctgacagaaaccccctgccccacaggggtctggacagtccggaatttctcccaagtccttgagaacaccagcaaaggggacaagcttcagagccctcgattctacaattcggagggatatggttttggggtaactttatacccaaatagcagagaaagctctggttacttgagacttgcttttcatgtgtgcagtggggagaacgatgctatcctggagtggccggtagaaaacagacaggtgataattaccatccttgaccaggagcctgatgtccggaacaggatgtcctcaagcatggtgttcactacctcgaagtcgcacacatctccagcgataaatgacactgtcatctgggacaggccgtccagggtgggaacctatcatacagactgtaattgttttagaagcatcgacttgggctggagtggtttcatttcccaccaaatgctgaaaaggaggagtttcctgaaaaatgatgacctcatcatatttgtggactttgaagatatcacccacctcagccagactgaagttccctctaaaggcaaaagactgagcccccaaggcctcattctccaaggccaggagcagcaggtctccgaagaaggttcgggaaaggccatgttagaggaagccctacctgtcagcctgagccaggggcagcccagccgacagaagcggtcggtggagaacacaggccccctggaggaccataactggccacagtacttcagagacccatgtgacccaaacccttgccaaaatgacggcatctgtgtgaacgtgaaggggatggcgagctgcaggtgcatctctggacatgctttcttctacacgggggagcgctgtcagtcggccgaggtgcacggcagtgtcctgggcatggtgatcggaggcacggctggcgtgatcttcttgaccttctccatcatcgccatcctttcccaaaggccaaggaagtgacctgcctgctggcattggccagaccacagcagcacctcctccatgcaggccttaactttcccatgttcaatgcagtttggggcagcttttttatcagccttgctttggataggacctccaaggactaagcctccagccccatgtgtgacccttgtcatctctctgccccacataattatgttactttgctatgtgctcctaatgtatctagtgtgtcctgtgacaacactcatcacacttcattgtaaatcacttgttttattgactgtctttcctatagactgtaagctccatgagggcaggcacatgttgttctcattgaccgtgctggccccagtgcctagatgcatggctggcacattgttggcactcaacaatggttgaatgaataaaacaataaatgaatgaataactaagatatagaaactctcatttatattgcagattgaatatatatgatgaaattcttatgttgaatatgttagaatcaaatactcatttttcattagatacagtagtgtcatcactcttttaagatcttgttaaagatttcaaataaaggtacttctggcgagccaggctgcacagcatttgctttcctctgagattctaagagaaggcctttaataaatttaataaatattgagttagcaaaaaaaaaaaaaaaaaa

SEQ ID NO: 264 - DNA, 60 bp, Homo sapiens
catcactcttttaagatcttgttaaagatttcaaataaaggtacttctggcgagccaggc

SEQ ID NO: 265 - DNA, 1549 bp, Homo sapiens
  misc_feature 1533, 1534: n = A,T,C or G
gggcgtctccgcagctcggctcccgcgcgctcagcaccaccagcggcgccagatgcaggcggagcgaggagctcggggaggccgtgggcggcggccaggccgcggccggcctggcggagatcgccacagcgagcggcccggagccgcagcggcggtagccagaggcggcggcggaggcggcggcggggacggaggcggacgccggggccgtggccgtggccggggcttccgcggcgctcgcggaggccgaggaggaggaggcgccccgcgaggcagccgccgggagccgggaggctggggcgcaggggccagcgcgccggttgaagatgacagcgatgcagagacctatggagaagagaatgatgaacagggaaattattctaaaagaaagattgtctctaactgggatcgatatcaagatattgaaaaagaggtcaataatgaaagtggagagtcacagaggggaacagatttcagtgtcctccttagctctgcaggggactcattctcacagttccggtttgctgaggagaaagaatgggatagtgaagcttcttgtccaaaacagaattcagcattttatgtggatagtgagttattggttcgagcccttcaagagctgcctctctgcctccgactcaacgttgctgccgaactggtccagggtacagttcctttagaggttcctcaggtgaaaccaaagagaactgatgatggcaagggattagggatgcagttaaaggggcccttggggcctggaggaagggggcccatctttgagctgaaatctgtggctgctggctgccctgtgttgctgggcaaagacaacccaagcccgggtccttcaagggattctcagaaacccacttccccactgcagtcagcaggagaccatttggaagaagaactagatctgttgcttaatttagatgcacctataaaagagggagataacatcttaccagatcagacgtctcaggacctgaaatccaaggaagatggggaggtggtccaagaggaagaagtttgtgcaaaaccatctgtgactgaagaaaaaaacatggaacctgagcaaccaagtacctccaaaaatgttaccgaggaagagctggaagactggttggacagcatgatttcctaaaaagggggaaaaaagtgcctgaagcaaatcttggttgccttctaacggcaggtgggcataaggctgtccttcaggaccagccagtttacaagcatgtctcaagctagtgtgttccattatgctcacagcagtaaatgcctacctctgtgtttgacatctgaaagaatacattgaagcagcttgttgcatttgtttttctggcttagtaatctaatagatttccttaagggcaggagatagactctggcccttgtttctagcctccttccttgcagtgtttacaacatagccagtgtttacagcatagcagatgctgctgctggttaagagaatagatgcaaacaaggcatgcatttggccaaaataaacaaatgctggtctgtccaaaaaannaaaaaaaaaaaaaaa

SEQ ID NO: 266 - DNA, 60 bp, Homo sapiens
tttacaagcatgtctcaagctagtgtgttccattatgctcacagcagtaaatgcctacct

SEQ ID NO: 267 - DNA, 8600 bp, Homo sapiens
  misc_feature 7444: n = A,T,C or G
gtgctgtacgtccaagatggcggcgcctgtaggctggagggactgtgaggtaaacagctgagggggaggagacggtggtgaccatgaaagacaccaggttgacagcactggaaactgaagtaccagttgtcgctagaacagtttggtagtggccccaatgaagaaccttcagaacctgtagcacacgtcctggagccagcacagcgccttcgagcgagagaatggcccaacaagcaaatgtcggggagcttcttgccatgctggactcccccatgctgggtgtgcgggacgacgtgacagctgtctttaaagagaacctcaattctgaccgtggccctatgcttgtaaacaccttggtggattattacctggaaaccagctctcagccggcattgcacatcctgaccaccttgcaagagccacatgacaagcacctcttggacaggattaacgaatatgtgggcaaagccgccactcgtttatccatcctctcgttactgggtcatgtcataagactgcagccatcttggaagcataagctctctcaagcacctcttttgccttctttactaaaatgtctcaagatggacactgacgtcgttgtcctcacaacaggcgtcttggtgttgataaccatgctaccaatgattccacagtctgggaaacagcatcttcttgatttctttgacatttttggccgtctgtcatcatggtgcctgaagaaaccaggccacgtggcggaagtctatctcgtccatctccatgccagtgtgtacgcactctttcatcgcctttatggaatgtacccttgcaacttcgtctcctttttgcgttctcattacagtatgaaagaaaacctggagacttttgaagaagtggtcaagccaatgatggagcatgtgcgaattcatccggaattagtgactggatccaaggaccatgaactggaccctcgaaggtggaagagattagaaactcatgatgttgtgatcgagtgtgccaaaatctctctggatcccacagaagcctcatatgaagatggctattctgtgtctcaccaaatctcagcccgctttcctcatcgttcagccgatgtcaccaccagcccttatgctgacacacagaatagctatgggtgtgctacttctaccccttactccacgtctcggctgatgttgttaaatatgccagggcagctacctcagactctgagttccccatcgacacggctgataactgaaccaccacaagctactctttggagcccatctatggtttgtggtatgaccactcctccaacttctcctggaaatgtcccacctgatctgtcacacccttacagtaaagtctttggtacaactgcaggtggaaaaggaactcctctgggaaccccagcaacctctcctcctccagccccactctgtcattcggatgactacgtgcacatttcactcccccaggccacagtcacaccccccaggaaggaagagagaatggattctgcaagaccatgtctacacagacaacaccatcttctgaatgacagaggatcagaagagccacctggcagcaaaggttctgtcactctaagtgatcttccagggtttttaggtgatctggcctctgaagaagatagtattgaaaaagataaagaagaagctgcaatatctagagaactttctgagatcaccacagcagaggcagagcctgtggttcctcgaggaggctttgactctcccttttaccgagacagtctcccaggttctcagcggaagacccactcggcagcctccagttctcagggcgccagcgtgaaccctgagcctttacactcctccctggacaagcttgggcctgacacaccaaagcaagcctttactcccatagacctgccctgcggcagtgctgatgaaagccctgcgggagacagggaatgccagacttctttggagaccagtatcttcactcccagtccttgtaaaattccacctccgacgagagtgggctttggaagcgggcagcctcccccgtatgatcatctttttgaggtggcattgccaaagacagcccatcattttgtcatcaggaagactgaggagctgttaaagaaagcaaaaggaaacacagaggaagatggtgtgccctctacctccccaatggaagtgctggacagactgatacagcagggagcagacgcgcacagcaaggagctgaacaagttgcctttacccagcaagtctgtcgactggacccactttggaggctctcctccttcagatgagatccgcaccctccgagaccagttgcttttactgcacaaccagttactctatgagcgttttaagaggcagcagcatgccctccggaacaggcggctcctccgcaaggtgatcaaagcagcagctctggaggaacataatgctgccatgaaagatcagttgaagttacaagagaaggacatccagatgtggaaggttagtctgcagaaagaacaagctagatacaatcagctccaggagcagcgtgacactatggtaaccaagctccacagccagatcagacagctgcagcatgaccgagaggaattctacaaccagagccaggaattacagacgaagctggaggactgcaggaacatgattgcggagctgcggatagaactgaagaaggccaacaacaaggtgtgtcacactgagctgctgctcagtcaggtttcccaaaagctctcaaacagtgagtcggtccagcagcagatggagttcttgaacaggcagctgttggttcttggggaggtcaacgagctctatttggaacaactgcagaacaagcactcagataccacaaaggaagtagaaatgatgaaagccgcctatcggaaagagctagaaaaaaacagaagccatgttctccagcagactcagaggcttgatacctcccaaaaacggattttggaactggaatctcacctggccaagaaagaccaccttcttttggaacagaagaaatatctagaggatgtcaaactccaggcaagaggacagctgcaggccgcagagagcaggtatgaggctcagaaaaggataacccaggtgtttgaattggagatcttagatttatatggcaggttggagaaagatggcctcctgaaaaaacttgaagaagaaaaagcagaagcagctgaagcagcagaagaaaggcttgactgttgtaatgacgggtgctcagattccatggtagggcacaatgaagaggcatctggccacaacggtgagaccaagacccccaggcccagcagcgcccggggcagtagtggaagcagaggtggtggaggcagcagcagcagcagcagcgagctttctaccccagagaaacccccacaccagagggcaggcccattcagcagtcggtgggagacgactatgggagaagcgtctgccagcatccccaccactgtgggctcacttcccagttcaaaaagcttcctgggtatgaaggctcgagagttatttcgtaataagagcgagagccagtgtgatgaggacggcatgaccagtagcctttctgagagcctaaagacagaactgggcaaagacttgggtgtggaagccaagattcccctgaacctagatggccctcacccgtctcccccgaccccggacagtgttggacagctacatatcatggactacaatgagactcatcatgaacacagctaaggaatgatggtcaatcagtgttaacttgcatattgttggcacagaacaggaggtgtgaatgcacgtttcaaagctttcctgtttccagggtctgagtgcaagttcatgtgtggaaatgggacggaggtcctttggacagctgactgaatgcagaacggtttttggatctggcattgaaatgcctcttgaccttcccctccacccgccctaaccccctctcatttacctcgcagtgtgttctaatccaagggccagttggtgttcctcagtagctttactttcttccttcccccccaaatggttgcgtcctttgaacctgtgcaatatgaggccaaatttaatctttgagtctaacacaccactttctgctttcccgaagttcagataactgggttggctctcaattagaccaggtagtttgttgcattgcaggtaagtctggttttgtcccttccaggaggacatagcctgcaaagctggttgtctttacatgaaagcgtttacatgagactttccgactgcttttttgattctgaagttcagcatctaaagcagcaggtctagaagaacaacggtttattcatacttgcattcttttggcagttctgataagcttcctagaaagttctgtgtaaacagaagcctgtttcagaaatctggagctggcactgtggagaccacacaccctttgggaaagctcttgtctcttcttcccccactacctcttatttatttggtgtttgcttgaatgctggtactattgtgaccacaggctggtgtgtaggtggtaaaacctgttctccataggagggaaggagcagtcactgggagaggttacccgagaagcacttgagcatgaggaactgcacctttaggccatctcagcttgctgggccttttgttaaacccttctgtctactggcctccctttgtgtgcatacgcctcttgttcatgtcagcttatatgtgacactgcagcagaaaggctctgaaggtccaaagagtttctgcaaagtgtatgtgaccatcatttcccaggccattagggttgcctcactgtagcaggttctaggctaccagaagaggggcagctttttcataccaattccaactttcaggggctgactctccagggagctgatgtcatcacactctccatgttagtaatggcagagcagtctaaacagagtccgggagaatgctggcaaaggctggctgtgtatacccactaggctgccccacgtgctcccgagagatgacactagtcagaaaagtggcagtggcagagaatccaaactcaacaagtgctcctgaaagaaatgctagaagcctaagaactgtggtctggtgttccagctgaggcagggggatttggtaggaaggagccagtgaacttggctttcctgtttctatctttcattaaaaagaatagaaggattcagtcataaagaggtaaaaaactgtcacggtacgaaatcttagtgcctacggaggcctcgagcagaaagaatgaaagtcttttttttttttttttttttttagcatggcaataaatattctagcatccctaactaaaggggactagacagttagagactctgtcaccctagctataccagcagaaaacctgttcaggcaggctttctgggtgtgactgattcccagcctgtggcagggcgtggtcccaactactcagcctagcacaggctggcagttggtactgaattgtcagatgtggagtattagtgacaccacacatttaattcagctttgtccaaaggaaagcttaaaacccaatacagtctagtttcctggttccgttttagaaaaggaaaacgtgaacaaacttagaaagggaaggaaatcccatcagtgaatcctgaaactggttttaagtgctttccttctcctcatgcccaagagatctgtgccatagaacaagataccaggcacttaaagccttttcctgaattggaaaggaaaagaggcccaagtgcaaaagaaaaaacattttagaaacggacagcttataaaaataaagggaagaaaggaggcagcatggagagaggcctgtgctagaagctccatggacgtgtctgcacagggtcctcagctcatccatgcggcctgggtgtccttttactcagctttataacaaatgtggctccaagctcaggtgcctttgagttctaggaggctgtgggttttattcaactacggttgggagaatgagacctggagtcatgttgaaggtgcccaacctaaaaatgtaggctttcatgttgcaaagaactccagagtcagtagttaggtttggtttggttttggacatgataaacctgccaagagtcaacaggtcacttgatcatgctgcagtgggtagttctaaggatggaaaggtgacagtattactctcgagaggcaattcagtcctgggcaaaggtattagtacaataagcgttaagggcagagtctaccttgaaaccaattaagcagcttggtattcataaatattgggattggatggcctccatccagaaatcactatgggtgagcatacctgtctcagctgtttggccaatgtgcataacctactcggatccccacctgacactaaccagagtcagcacaggccccgaggagcccgaagttctctgctgtgcagcatggaattcctttaaaaaggtgcactacagttttagcggggagggggataggaagacgcagagcaaatgagctccggagtccctgcaggtgaataaacacacagatctgcatctgatagaactttgatggattttcaaaaagccgttgacaaggctctgctatacagtctataaaaattgttattatgggattggaagaaacacatggtcatgaatagaaaaaaaacaaacccaaaggtaggaaggtcaaggtcatttcttagatggagaagttgtgaaagatgtccttggagatgagttttaggaccagcattactaaggcaggtgggcagacagtgacctctctaggtgtgtccacagagtttttcaggagagaaaactgcctgacctttgggactaagctgcggaatcttcttactaagcttgaagagtggagaggcgagaggtgagctactttgtgagccaaagcttatgtgacatggttggggaaacagtccaaactgttctgagaaggtgaactgttacgacccaggacaattagaaaaattcacccaccatgccgcacattactgggtaaaagcagggcagcagggaacaaaactccagactcttgggccgtccccatttgcaacagcacacatagtttctggtatatttgttgggaaagataaaactctagcagttgttgaggggaggatgtataaaatggtcatggggatgaaaggatctctgagaccacagaggctcagactcactgttaagaatagaaaactgggtatgcgtttcatgtagccagcagaactgaagtgtgctgtgacaagccaatgtgaatttctaccaaatagtagagcataccacttgaagaaggaaagaaccgaagagcaaacaaaagttctgcgtaatgagactcaccttttctcgctgaaagcactaagaggtgggaggaggcctgcacaggctggaggagggtttgggcagagcgaagacccggccaggaccttggtgagatggagtgccgcccacctcctgcggatactcttggagagttgttcccccaggggnctctgccccacctggagaaggaagctgcctggtgtggagtgactcaaatcagtatacctatctgctgcaccttcactctccagggtacatgctttaaaaccgacccgcaacaagtattggaaaaatgtatccagtctgaagatgtttgtgtatctgtttacatccagagttctgtgacacatgccccccagattgctgcaaagatcccaaggcattgattgcacttgattaagcttttgtctgtaggtgaaagaacaagtttaggtcgaggactggcccctaggctgctgctgtgacccttgtcccatgtggcttgtttgcctgtccgggactcttcgatgtgcccaggggagcgtgttcctgtctcttccatgccgtcctgcagtccttatctgctcgcctgagggaagagtagctgtagctacaagggaagcctgcctggaagagccgagcacctgtgcccatggcttctggtcatgaaacgagttaatgatggcagaggagcttcctccccacttcgcagcgccacattatccatcctctgagataagtaggctggtttaaccattggaatggacctttcagtggaaaccctgagagtctgagaacccccagaccaacccttccctccctttccccacctcttacagtgtttggacaggagggtatggtgctgctctgtgtagcaagtactttggcttatgaaagaggcagccacgcattttgcactaggaagaatcagtaatcacttttcagaagacttctatggaccacaaatatattacggaggaacagattttgctaagacataatctagttttataactcaatcatgaatgaaccatgtgtggcaaacttgcagtttaaaggggtcccatcagtgaaagaaactgattttttttaacggactgcttttagttaaattgaagaaagtcagctcttgtcaaaaggtctaaactttcccgcctcaatcctaaaagcatgtcaacaatccacatcagatgccataaatatgaactgcaggataaaatggtacaatcttagtgaatgggaattggaatcaaaagagtttgctgtccttcttagaatgttctaaaatgtcaaggcagttgcttgtgtttaactgtgaacaaataaaaatttattgttttgcact

SEQ ID NO: 268 - DNA, 60 bp, Homo sapiens
cggacagtgttggacagctacatatcatggactacaatgagactcatcatgaacacagct

SEQ ID NO: 269 - DNA, 2862 bp, Homo sapiens
gcggcgcgcgtccctgggcctccgcgcgtgagcggcgcgcgcgcccccgcgggccccggcgggaggagagtcggcggccggagccgtcaccccgggcggggacccagcgcaggcaactccgcgcggcggcccggccgagggagggagcgagcgggcgggcgggcaagccagacagctgggccggagcagccgcgggcgcccgaggggccgagcgagattgtaaaccatggctgtgtggatacaagctcagcagctccaaggagaagcccttcatcagatgcaagcgttatatggccagcattttcccattgaggtgcggcattatttatcccagtggattgaaagccaagcatgggactcagtagatcttgataatccacaggagaacattaaggccacccagctcctggagggcctggtgcaggagctgcagaagaaggcagagcaccaggtgggggaagatgggtttttactgaagatcaagctggggcactatgccacacagctccagaacacgtatgaccgctgccccatggagctggtccgctgcatccgccatatattgtacaatgaacagaggttggtccgagaagccaacaatggtagctctccagctggaagccttgctgatgccatgtcccagaaacacctccagatcaaccagacgtttgaggagctgcgactggtcacgcaggacacagagaatgagttaaaaaagctgcagcagactcaggagtacttcatcatccagtaccaggagagcctgaggatccaagctcagtttggcccgctggcccagctgagcccccaggagcgtctgagccgggagacggccctccagcagaagcaggtgtctctggaggcctggttgcagcgtgaggcacagacactgcagcagtaccgcgtggagctggccgagaagcaccagaagaccctgcagctgctgcggaagcagcagaccatcatcctggatgacgagctgatccagtggaagcggcggcagcagctggccgggaacggcgggccccccgagggcagcctggacgtgctacagtcctggtgtgagaagttggccgagatcatctggcagaaccggcagcagatccgcagggctgagcacctctgccagcagctgcccatccccggcccagtggaggagatgctggccgaggtcaacgccaccatcacggacattatctcagccctggtgaccagcacgttcatcattgagaagcagcctcctcaggtcctgaagacccagaccaagtttgcagccactgtgcgcctgctggtgggcgggaagctgaacgtgcacatgaaccccccccaggtgaaggccaccatcatcagtgagcagcaggccaagtctctgctcaagaacgagaacacccgcaatgattacagtggcgagatcttgaacaactgctgcgtcatggagtaccaccaagccacaggcacccttagtgcccacttcaggaatatgtccctgaaacgaattaagaggtcagaccgtcgtggggcagagtcggtgacagaagaaaaatttacaatcctgtttgaatcccagttcagtgttggtggaaatgagctggtttttcaagtcaagaccctgtccctgccagtggtggtgatcgttcatggcagccaggacaacaatgcgacggccactgttctctgggacaatgcttttgcagagcctggcagggtgccatttgccgtgcctgacaaagtgctgtggccacagctgtgtgaggcgctcaacatgaaattcaaggccgaagtgcagagcaaccggggcctgaccaaggagaacctcgtgttcctggcgcagaaactgttcaacaacagcagcagccacctggaggactacagtggcctgtctgtgtcctggtcccagttcaacagggagaatttaccaggacggaattacactttctggcaatggtttgacggtgtgatggaagtgttaaaaaaacatctcaagcctcattggaatgatggggccattttggggtttgtaaacaagcaacaggcccatgacctactcattaacaagccagatgggaccttcctcctgagattcagtgactcagaaattggcggcatcaccattgcttggaagtttgattctcaggaaagaatgttttggaatctgatgccttttaccaccagagacttctccattcggtccctagccgaccgcttgggagacttgaattaccttatctacgtgtttcctgatcggccaaaagatgaagtatactccaaatactacacaccagttccctgcgagtctgctactgctaaagctgttgatggatacgtgaagccacagatcaagcaagtggtccctgagtttgtgaacgcatctgcagatgccgggggcggcagcgccacgtacatggaccaggccccctccccagctgtgtgtccccaggctcactataacatgtacccacagaaccctgactcagtccttgacaccgatggggacttcgatctggaggacacaatggacgtagcgcggcgtgtggaggagctcctgggccggccaatggacagtcagtggatcccgcacgcacaatcgtgaccccgcgacctctccatcttcagcttcttcatcttcaccagaggaatcactcttgtggatgttttaattccatgaatcgcttctcttttgaaacaatactcataatgtgaagtgttaatactagttgtgaccttagtgtttctgtgcatggtggcaccagcgaagggagtgcgagtatgtgtttgtgtgtgtgtgtgtgtgtgtgtgtgtgtgcgttggtgcacgttatggtgtttctccctctcactgtctgagagtttagttgtagcaga

SEQ ID NO: 270 - DNA, 60 bp, Homo sapiens
caccagaggaatcactcttgtggatgttttaattccatgaatcgcttctcttttgaaaca

SEQ ID NO: 271 - DNA, 3426 bp, Homo sapiens
gagcaatgatgtagccacctcctaaccttcccttcttgaacccccaggtcccctcttgctgttggctgcacatcaggaaggctgtgatgggaatgaaggtgaaaacttggagatttcacttcagtcattgcttctgcctgcaagatcatcctttaaaagtagagaagctgctctgtgtggtggttaactccaagaggcagaactcgttctagaaggaaatggatgcaagcagctccgggggccccaaacgcatgcttcctgtgatctagcccagggaagcccttccgtgggggccccggctttgagggatgccaccggttctggacgcatggctgattctgaatgatgatggttcgccgggggctgcttgcgtggatttcccgggtggtggttttgctggtgctcctctgctgtgctatctctgtcctgtacatgttggcctgcaccccaaaaggtgacgaggagcagctggcactgcccagggccaacagccccacggggaaggaggggtaccaggccgtccttcaggagtgggaggagcagcaccgcaactacgtgagcagcctgaagcggcagatcgcacagctcaaggaggagctgcaggagaggagtgagcagctcaggaatgggcagtaccaagccagcgatgctgctggcctgggtctggacaggagccccccagagaaaacccaggccgacctcctggccttcctgcactcgcaggtggacaaggcagaggtgaatgctggcgtcaagctggccacagagtatgcagcagtgcctttcgatagctttactctacagaaggtgtaccagctggagactggccttacccgccaccccgaggagaagcctgtgaggaaggacaagcgggatgagttggtggaagccattgaatcagccttggagaccctgaacaatcctgcagagaacagccccaatcaccgtccttacacggcctctgatttcatagaagggatctaccgaacagaaagggacaaagggacattgtatgagctcaccttcaaaggggaccacaaacatgaattcaaacggctcatcttatttcgaccattcggccccatcatgaaagtgaaaaatgaaaagctcaacatggccaacacgcttatcaatgttatcgtgcctctagcaaaaagggtggacaagttccggcagttcatgcagaatttcagggagatgtgcattgagcaggatgggagagtccatctcactgttgtttactttgggaaagaagaaataaatgaagtcaaaggaatacttgaaaacacttccaaagctgccaacttcaggaactttaccttcatccagctgaatggagaattttctcggggaaagggacttgatgttggagcccgcttctggaagggaagcaacgtccttctctttttctgtgatgtggacatctacttcacatctgaattcctcaatacgtgtaggctgaatacacagccagggaagaaggtattttatccagttcttttcagtcagtacaatcctggcataatatacggccaccatgatgcagtccctcccttggaacagcagctggtcataaagaaggaaactggattttggagagactttggatttgggatgacgtgtcagtatcggtcagacttcatcaatataggtgggtttgatctggacatcaaaggctggggcggagaggatgtgcacctttatcgcaagtatctccacagcaacctcatagtggtacggacgcctgtgcgaggactcttccacctctggcatgagaagcgctgcatggacgagctgacccccgagcagtacaagatgtgcatgcagtccaaggccatgaacgaggcatcccacggccagctgggcatgctggtgttcaggcacgagatagaggctcaccttcgcaaacagaaacagaagacaagtagcaaaaaaacatgaactcccagagaaggattgtgggagacactttttctttccttttgcaattactgaaagtggctgcaacagagaaaagacttccataaaggacgacaaaagaattggactgatgggtcagagatgagaaagcctccgatttctctctgttgggctttttacaacagaaatcaaaatctccgctttgcctgcaaaagtaacccagttgcaccctgtgaagtgtctgacaaaggcagaatgcttgtgagattataagcctaatggtgtggaggttttgatggtgtttacaatacactgagacctgttgttttgtgtgctcattgaaatattcatgatttaagagcagttttgtaaaaaattcattagcatgaaaggcaagcatatttctcctcatatgaatgagcctatcagcagggctctagtttctaggaatgctaaaatatcagaaggcaggagaggagataggcttattatgatactagtgagtacattaagtaaaataaaatggaccagaaaagaaaagaaaccataaatatcgtgtcatattttccccaagattaaccaaaaataatctgcttatctttttggttgtccttttaactgtctccgtttttttcttttatttaaaaatgcactttttttcccttgtgagttatagtctgcttatttaattaccactttgcaagccttacaagagagcacaagttggcctacatttttatattttttaagaagatactttgagatgcattatgagaactttcagttcaaagcatcaaattgatgccatatccaaggacatgccaaatgctgattctgtcaggcactgaatgtcaggcattgagacatagggaaggaatggtttgtactaatacagacgtacagatactttctctgaagagtattttcgaagaggagcaactgaacactggaggaaaagaaaatgacactttctgctttacagaaaaggaaactcattcagactggtgatatcgtgatgtacctaaaagtcagaaaccacattttctcctcagaagtagggaccgctttcttacctgtttaaataaaccaaagtataccgtgtgaaccaaacaatctcttttcaaaacagggtgctcctcctggcttctggcttccataagaagaaatggagaaaaatatatatatatatatatatattgtgaaagatcaatccatctgccagaatctagtgggatggaagtttttgctacatgttatccaccccaggccaggtggaagtaactgaattattttttaaattaagcagttctactcgatcaccaagatgcttctgaaaattgcattttattaccatttcaaactattttttaaaaataaatacagttaacatagagtggtttcttcattcatgtgaaaattattagccagcaccagatgcatgagctaattatctctttgagtccttgcttctgtttgctcacagtaagctcattgtttaaaagcttc

SEQ ID NO: 272 - DNA, 60 bp, Homo sapiens
cagaagtagggaccgctttcttacctgtttaaataaaccaaagtataccgtgtgaaccaa

SEQ ID NO: 273 - DNA, 1335 bp, Homo sapiens
atgcgcagcacgcgccgcgcagccatggggaggctgctggccttagtggtcggcgcggcactggtgtcctcagcctgcgggggctgcgtggaggtggactcggagaccgaggccgtgtatgggatgaccttcaaaattctttgcatctcctgcaagcgccgcagcgagaccaacgctgagaccttcaccgagtggaccttccgccagaagggcactgaggagtttgtcaagatcctgcgctatgagaatgaggtgttgcagctggaggaggatgagcgcttcgagggccgcgtggtgtggaatggcagccggggcaccaaagacctgcaggatctgtctatcttcatcaccaatgtcacctacaaccactcgggcgactacgagtgccacgtctaccgcctgctcttcttcgaaaactacgagcacaacaccagcgtcgtcaagaagatccacattgaggtagtggacaaagccaacagagacatggcatccatcgtgtctgagatcatgatgtatgtgctcattgtggtgttgaccatatggctcgtggcagagatgatttactgctacaagaagatcgctgccgccacggagactgctgcacaggagaatgcctcggaatacctggccatcacctctgaaagcaaagagaactgcacgggcgtccaggtggccgaatagccctggccctgggccccgcctcaaggaagagccagccgtaatggggactctccaggcaccgcctgcccccagcgtgggggtggccactcctgggccccagaaagcctcagagtccctgccgacggagccactggggtgggagggggcagggggcttggctcgcacccccactttcgcctcctccagctcctgccccgccggccgcgcaccgccatgcatgatgggtaaagcaatactgccgctgcccccaccctgcttctgctgcctgtttggggaggggggcggtgaggtgggcagcggccccgcacccctcctccttgctcatttgcacacattggccgcttcagacacgcacttctggggccagcccctccccgcctcctccctgcctggcggcaggggtcgcgatgatgggctggagcagtttggggcagggggttctgggacccactccgactccccctccccggcatcatttcccctcccgcttctccggctgacctggggtcccccctccctgtaatgcactcctgccccggcccaacctcgccctctctcaccagccttgaactgtggccacctagaaaggggcccattcagcctcgtctctttacagaagtagttttgttcatgaaataaagactcttggacttg

SEQ ID NO: 274 - DNA, 60 bp, Homo sapiens
cccattcagcctcgtctctttacagaagtagttttgttcatgaaataaagactcttggac

SEQ ID NO: 275 - DNA, 4868 bp, Homo sapiens
gcggccgcgtctttgttccagacgcagtccaggaatcatgctggagaagttctgcaactctactttttggaattcctcattcctggacagtccggaggcagacctgccactttgttttgagcaaactgttctggtgtggattcccttgggcttcctatggctcctggccccctggcagcttctccacgtgtataaatccaggaccaagagatcctctaccaccaaactctatcttgctaagcaggtattcgttggttttcttcttattctagcagccatagagctggcccttgtactcacagaagactctggacaagccacagtccctgctgttcgatataccaatccaagcctctacctaggcacatggctcctggttttgctgatccaatacagcagacaatggtgtgtacagaaaaactcctggttcctgtccctattctggattctctcgatactctgtggcactttccaatttcagactctgatccggacactcttacagggtgacaattctaatctagcctactcctgcctgttcttcatctcctacggattccagatcctgatcctgatcttttcagcattttcagaaaataatgagtcatcaaataatccatcatccatagcttcattcctgagtagcattacctacagctggtatgacagcatcattctgaaaggctacaagcgtcctctgacactcgaggatgtctgggaagttgatgaagagatgaaaaccaagacattagtgagcaagtttgaaacgcacatgaagagagagctgcagaaagccaggcgggcactccagagacggcaggagaagagctcccagcagaactctggagccaggctgcctggcttgaacaagaatcagagtcaaagccaagatgcccttgtcctggaagatgttgaaaagaaaaaaaagaagtctgggaccaaaaaagatgttccaaaatcctggttgatgaaggctctgttcaaaactttctacatggtgctcctgaaatcattcctactgaagctagtgaatgacatcttcacgtttgtgagtcctcagctgctgaaattgctgatctcctttgcaagtgaccgtgacacatatttgtggattggatatctctgtgcaatcctcttattcactgcggctctcattcagtctttctgccttcagtgttatttccaactgtgcttcaagctgggtgtaaaagtacggacagctatcatggcttctgtatataagaaggcattgaccctatccaacttggccaggaaggagtacaccgttggagaaacagtgaacctgatgtctgtggatgcccagaagctcatggatgtgaccaacttcatgcacatgctgtggtcaagtgttctacagattgtcttatctatcttcttcctatggagagagttgggaccctcagtcttagcaggtgttggggtgatggtgcttgtaatcccaattaatgcgatactgtccaccaagagtaagaccattcaggtcaaaaatatgaagaataaagacaaacgtttaaagatcatgaatgagattcttagtggaatcaagatcctgaaatattttgcctgggaaccttcattcagagaccaagtacaaaacctccggaagaaagagctcaagaacctgctggcctttagtcaactacagtgtgtagtaatattcgtcttccagttaactccagtcctggtatctgtggtcacattttctgtttatgtcctggtggatagcaacaatattttggatgcacaaaaggccttcacctccattaccctcttcaatatcctgcgctttcccctgagcatgcttcccatgatgatctcctccatgctccaggccagtgtttccacagagcggctagagaagtacttgggaggggatgacttggacacatctgccattcgacatgactgcaattttgacaaagccatgcagttttctgaggcctcctttacctgggaacatgattcggaagccacagtccgagatgtgaacctggacattatggcaggccaacttgtggctgtgataggccctgtcggctctgggaaatcctccttgatatcagccatgctgggagaaatggaaaatgtccacgggcacatcaccatcaagggcaccactgcctatgtcccacagcagtcctggattcagaatggcaccataaaggacaacatcctttttggaacagagtttaatgaaaagaggtaccagcaagtactggaggcctgtgctctcctcccagacttggaaatgctgcctggaggagatttggctgagattggagagaagggtataaatcttagtgggggtcagaagcagcggatcagcctggccagagctacctaccaaaatttagacatctatcttctagatgaccccctgtctgcagtggatgctcatgtaggaaaacatatttttaataaggtcttgggccccaatggcctgttgaaaggcaagactcgactcttggttacacatagcatgcactttcttcctcaagtggatgagattgtagttctggggaatggaacaattgtagagaaaggatcctacagtgctctcctggccaaaaaaggagagtttgctaagaatctgaagacatttctaagacatacaggccctgaagaggaagccacagtccatgatggcagtgaagaagaagacgatgactatgggctgatatccagtgtggaagagatccccgaagatgcagcctccataaccatgagaagagagaacagctttcgtcgaacacttagccgcagttctaggtccaatggcaggcatctgaagtccctgagaaactccttgaaaactcggaatgtgaatagcctgaaggaagacgaagaactagtgaaaggacaaaaactaattaagaaggaattcatagaaactggaaaggtgaagttctccatctacctggagtacctacaagcaataggattgttttcgatattcttcatcatccttgcgtttgtgatgaattctgtggcttttattggatccaacctctggctcagtgcttggaccagtgactctaaaatcttcaatagcaccgactatccagcatctcagagggacatgagagttggagtctacggagctctgggattagcccaaggtatatttgtgttcatagcacatttctggagtgcctttggtttcgtccatgcatcaaatatcttgcacaagcaactgctgaacaatatccttcgagcacctatgagattttttgacacaacacccacaggccggattgtgaacaggtttgccggcgatatttccacagtggatgacaccctgcctcagtccttgcgcagctggattacatgcttcctggggataatcagcacccttgtcatgatctgcatggccactcctgtcttcaccatcatcgtcattcctcttggcattatttatgtatctgttcagatgttttatgtgtctacctcccgccagctgaggcgtctggactctgtcaccaggtccccaatctactctcacttcagcgagaccgtatcaggtttgccagttatccgtgcctttgagcaccagcagcgatttctgaaacacaatgaggtgaggattgacaccaaccagaaatgtgtcttttcctggatcacctccaacaggtggcttgcaattcgcctggagctggttgggaacctgactgtcttcttttcagccttgatgatggttatttatagagataccctaagtggggacactgttggctttgttctgtccaatgcactcaatatcacacaaaccctgaactggctggtgaggatgacatcagaaatagagaccaacattgtggctgttgagcgaataactgagtacacaaaagtggaaaatgaggcaccctgggtgactgataagaggcctccgccagattggcccagcaaaggcaagatccagtttaacaactaccaagtgcggtaccgacctgagctggatctggtcctcagagggatcacttgtgacatcggtagcatggagaagattggtgtggtgggcaggacaggagctggaaagtcatccctcacaaactgcctcttcagaatcttagaggctgccggtggtcagattatcattgatggagtagatattgcttccattgggctccacgacctccgagagaagctgaccatcatcccccaggaccccatcctgttctctggaagcctgaggatgaatctcgaccctttcaacaactactcagatgaggagatttggaaggccttggagctggctcacctcaagtcttttgtggccagcctgcaacttgggttatcccacgaagtgacagaggctggtggcaacctgagcataggccagaggcagctgctgtgcctgggcagggctctgcttcggaaatccaagatcctggtcctggatgaggccactgctgcggtggatctagagacagacaacctcattcagacgaccatccaaaacgagttcgcccactgcacagtgatcaccatcgcccacaggctgcacaccatcatggacagtgacaaggtaatggtcctagacaacgggaagattatagagtgcggcagccctgaagaactgctacaaatccctggacccttttactttatggctaaggaagctggcattgagaatgtgaacagcacaaaattctagcagaaggccccatgggttagaaaaggactataagaataatttcttatttaattttattttttataaaatacagaatacatacaaaagtgtgtataaaatgtacgttttaaaaaaggataagtgaacacccatgaacctactacccaggttaagaaaataaatgtcaccaggtacttgagaaacccctcgattg

SEQ ID NO: 276 - DNA, 60 bp, Homo sapiens
agtgtgtataaaatgtacgttttaaaaaaggataagtgaacacccatgaacctactaccc

SEQ ID NO: 277 - DNA, 1888 bp, Homo sapiens
gccgttttctttcctggtgtcccgtcgcggcttgggacccggcaagatgggcaagaagggcaagaaggagaagaagggccgcggcgcggagaagacggccgccaagatggagaagaaggtgtctaagcgctcgcggaaggaggaggaagacctggaagcgctcatagcccatttccagacactcgatgccaagaggactcagactgtggaacttccgtgccccccaccctcaccaaggttaaatgcctccctctcggttcatcctgagaaagatgagttaatcctttttggaggtgaatatttcaacggccaaaaaacttttttgtataacgagctctatgtctacaataccagaaaggacacctggaccaaagttgacatccccagtccacctccgaggcgctgtgctcaccaggcggtggtagtgcctcaaggtggcggacagctgtgggtctttggaggggagtttgcctctcccaacggagagcagttctaccactacaaggatctctgggtcctgcatttggccaccaagacctgggaacaagtcaaatcaacaggcggtccttcgggtcggagtggacatcggatggtggcctggaagagacaattgatcctgtttggtggcttccatgaaagtacacgggattacatctactacaacgacgtgtatgcctttaatctggacaccttcacatggagcaagctgtccccgtcagggacggggcccacacccagatcaggctgccagatgtccgtcactccccagggcggcatcgtcgtctatgggggctactcgaaacagagagttaagaaagacgtggacaagggcacacggcactcagacatgttcctgctgaagccagaggacggaagagaagacaagtgggtttggactcggatgaacccttcgggggtcaagcccaccccacggtctggcttttccgtggccatggccccgaatcaccagacactgttcttcgggggtgtctgtgacgaggaagaggaggagagcctgtcgggcgagttcttcaacgatctgtacttctacgacgccaccaggaaccgttggtttgagggacagctgaagggacccaagtctgaaaagaagaaacgcaggcggggcagaaaagaggagcccgaaggtggtagcaggccggcgtgtgggggagctggcacccaggggcctgtgcagctggtcaaggaggtggtggccgaggatggcaccgtggtcaccattaagcaggtgctcaccgcgccaggctcggcggggcagccccggtctgaggacgaagacagccttgaggaggccggcagccccgcacctgggccgtgtccacgctccaacgccatgctggctgtgaagcatggggtgctctacgtctatgggggcatgtttgaggccggcgaccgccaggtcaccctcagcgacctgcactgcctggacctgcacaggatggaggcgtggaaggccttggtggagatggacccagaaactcaggagtggctggaggagacggactcggaagaggacagtgaggaggttgagggcgccgagggtggggtcgacgacgaagacagcggagaggagagcggtgcggaggactgagaagagcccctgccaggggcgcctggcaagtgctgtgcccacgtccgcccaggacccagccgtgttgagtgaagctcttggggccagcgtgcgtcctgacgcacaggagagagctgaaggtgggtggcccaggccagggtgtgaactttctcccatggtttagtctctgacgcggcactgggccggaagttcaactgagtgcagtgcaggtggattccctcagcagcctgtgtgttgtgtgaaataaattggacttgaaacaagaaaaaaaaaaaaaaa

SEQ ID NO: 278 - DNA, 60 bp, Homo sapiens
aggtggattccctcagcagcctgtgtgttgtgtgaaataaattggacttgaaacaaaaaa

SEQ ID NO: 279 - DNA, 6053 bp, Homo sapiens
gaaattttgagaagtggtgggatgaagaagatccctgaagagaggagtaactgagacaaaggcgaggctagcaatagagagacaagtgagggaattagacctttggtatcatcatgaaaaggcctggaagaaacgctggtttatcctgcggagtggccggatgagcggtgacccagatgttctggaatactacaagaacgatcactccaagaagcctctgcggatcatcaacctgaacttctgtgagcaggtagatgcaggcctgacctttaacaagaaggagctgcaggatagttttgtgtttgacatcaagaccagtgaacgcaccttttacctggtggctgagacagaagaggacatgaataagtgggtccagagcatctgccagatctgtggcttcaatcaggctgaggagagcacagactccctgagaaatgtttcctcagccggtcatggcccccgctcttctccagctgagctcagcagctctagccagcaccttctccgagagcgcaagtcctcagccccatcacactccagccagccaactctgttcacgtttgaaccccctgtgtcaaaccacatgcagcccaccttgtccaccagcgcacctcaggagtatctctacttgcaccagtgcataagccgaagagcagaaaatgcaaggagtgccagcttctctcagggcaccagagcctcttttctcatgaggagtgacacagctgtacaaaaacttgcccagggcaatggacactgtgtcaacgggatcagtggtcaagtccatggcttctatagccttcccaagccgagccggcacaatacagaattcagagacagtacctacgacctcccccgcagcctggcctcccatggccacaccaagggcagcctcacaggctccgagacagataatgaggatgtgtacaccttcaagacgcccagcaacaccctgtgcagggagttcggggacctcctggtagacaatatggatgttccggccaccccactctcagcctaccagatccctaggacattcactctggacaaaaaccacaatgccatgacagtggccactcctggggactcagccatagctcccccaccccgcccccccaagccaagtcaggcagaaacacctcgatggggcagtcctcagcagagaccgccaatcagtgaaaatagcagatctgtcgctgccaccatccccagacgcaacaccctccctgcaatggacaacagccgacttcaccgagcttcttcctgtgagacctacgagtacccacagcgtggtggagagagtgcaggccggtctgctgaatccatgagtgatggagttggctctttcctgccagggaaaatgattgtgggccgatcggacagcaccaattctgaagacaactatgtgcccatgaatccaggttcttccaccctgttggccatggaacgagcaggtgataattcccagagcgtctacatcccaatgagcccaggggcccatcactttgactcacttggctacccatcaacaacccttcctgtgcaccgaggccccagcagaggaagtgagattcagccaccccctgtcaaccgcaacctcaaacctgatcggaaagcaaagccaacaccacttgacctgaggaacaacaccgtcatcgatgaactccccttcaagtcacctatcaccaagtcttggtctagggccaaccacaccttcaactccagctcctcccagtactgccgccccatctccacccagagcatcaccagcacagactcaggagacagcgaagagaactatgtccctatgcaaaacccagtgtctgcatctcccgttcccagtggcacgaacagtcctgcccctaagaagagcaccggcagcgttgattatctggccctggacttccagccgagctccccaagcccccaccgcaagccatctacttcatccgtcacctctgatgagaaggtggactacgttcaggtggacaaggagaagacccaggccctgcagaacaccatgcaggagtggacagacgtgcggcagtcctcagagccttccaagggtgccaagctgtgatgagagggccaccgcagagcccaggaggcagcatctccagagctggcccttcccatctcccctctcccctctcccgttcttcctcccatccacctcctctctactctgccagtctcagccttcaaagcacttgacatcagggaccctgaacccttcccctgggaggtgagggcctgatcaaggcacctcctctgcccactcggggcccagctgtgatttttatcagtaatggccatgcctccacccaccttagttaggagctacttccaaaaagcatccttcagcctcttcctgtcctttagacctgactctctaccagatgtttggagggaagggctggggctctgagccagattccacacctcacgttcagtcacagccctcagctatcttccctccggccactgggctacctctccttcagtcccagaagacaagtctcaccaacccagggagtcaaggaccagcaaaccaaagtggataatggactttttcattcctgtttttcttggcaggagagaagcaaggccactaaaagaggagatggtggagacggaggctcagcagtggtcttgaggggtaaaggacttagatgcccagatgaagagggaaagctgacatctgcagggaacccactttgaggctgaggccatggcaggacagctgctgtggggtgcagaggcagaagatgaaggacaaaaggaagggaaaactgatggccaacctagagcagcaaggagcagggcttggagctcgggtggtggagatgacaaggacactgtggggtctgggtccccagaactctggagctacaggccactctaggcccaagggctagtcctcttccccagtcccctcagaggcccccgccagccccaccttgaaagcagcatacaggggaaggcttggaccaagctgggcgaccaagcacatggggcaggaacacatggtaaaggggtggggaatatgggagggagtgtggtgtggatgggggtgatgcagggactgaggggaaccctgggacaggcacaggctgggcagaggcacagggcagtgcaggggactctgcagtggggtcgggaagtgagtttctttgcagtgagcagtgcagtggaagtcgggcacagaggtagcagacagatgtgaagcagtggtgaaggccatgtagcaagtggggaaatacatccaaagggcctgggagttggggggtgcccaacgcaatccttgggggtgcagggtggagcagaaagtgaaggagggacacgtgcaagagtggtgtgcatggtggtgtgacatgaggaccgttcctaggatgggacagtgggtcaggcaggacaaggagaaagcagggcagaatgatgcctagaggaccacatcaggcatggctgacagcttgtgcccatgggctgtggcgtatgtcagatcgcagggtaggaacgagtctggcctggtgccggcccagtgtttcctcagctcatccgccctctgttgctccctagcattccaggagccatcttggactctcctccccaggtttgaaaggccatcagattagcagggacggggtgtagggcatcacccaaggttccttctcttaaactaagggtgggggatctgaatgtttttatgttgactgttcttgactaaattttcaagagtttcagaagcaacaggacagaccagacgtttcattctaccctggggcgaacagaacttcttcctcccaaacaatgacttcctgccatgtttgatggggacagctaccactgtcctctgcccccattcccctttcagctcccatgagcatgcatagttcaccagaccaatggcctagccattctctaagtcccatcctggaagaagttatttcttcaagagctgcacctctcctcctagcattagtttagatcaactcaaggagtatttattaatggctgctgtctccagtttctggggttaagcactaaggacacaagaatcaatcagaccttctccctgaacttaagatagccacaatcagaaaaaggacaaggacatgagacagtggtgatggccatcagacagagacttcaaatgctgatggagggcagaggaagtacttagggaggttggtgtcagaggcaggagtgggggatcagggaaggtggattctaggaaaagggagtgcctgaggtaggccttagaaggggatgagtcagatttttacagaggaggagggcagggcttgggtccagtggaggaagaaggaaggagaggcttggaaagccttgtgtcttgggaaaaaaaggcctttgagcatatgggtccagccactcagaagtgcaggggccatgccttggtgttccaataagtgaatggaagcagtggtggtagctacactgggcagagttggcagggtgctggttcactctgcccagccctgaatgtgtgccttaaaggccccctacaaggggccccatacgacagagcttttaactggtgccttccctgtacccgcagcagccacaagtgggcccagactattgcagcctcccataaacatgtgagcatgttctgagtgtgccatgatgtgagtggacctggctggaatcttcggagagcgactgaggtgttcaaatcgaatctcccaggaggcttccttccagccccctattctggtaactaccaggaggcttccttccagccccctattctggtaactaccaaaatccctcgggtgcaagtgtaggggtagagatggaaggatgagaggtgaaattgaccttttgaaagcaaagctctggctcacaggccccaaactaccagccgtatctagcatatccccaccctccacccactacctcctccaacaaaggagtcaactcagttgaaaaaactggtcctttggcctatccatgggtcaaagtccacctctcctgggggcctggagaggactgagcctacggaaaggggataccttcccactcagcactgcttcacacaggccccctgcctggggctctccaaggagccttcttcacccacttccagctccacttctgcaaggttaagtcaagtgagaacgatgagaaatagggagatggtgtctccttaagtccttgatctgcctgtctgtggaatgggaggttggattagctgcgctgaggtcccatccacagctggtgctcagctgcttgaaggggagactccctcctctgtaacttctttctgggggattggggtgggcagtacctatccccagtcccctcctagcttgactttagtggtttccaatgtagaagttaacaaagtatgccccattcctgtgacaaaagcacaaccattctgaagttactggagcatgggctcagctcatcctccctctggccccttctcccatggggacatctcggcccagcacccctatcccatttccagagttcttccttccccatctgggccttcataaaatgcaggggaagccagactggtctcaggagcgctaaagcccttccgtggggggtcgtctttctgggactagccctgctgtttaggacctgggaccacaatggggtacctgccgagggggtccccaagagatccaggctgtcatgtgatttatggtggcatgtgttgtgtatttgttggctacttgtgtcttgaaatctagaattatttcacgcagaattgtcactgtttgtcaggaagagaaaatgggctagtggaagcccagtcttgagttcttgtcttgttaccatttaaaattgacatttaattttcaaatcactgttggtgcctaatcacttaagttattaatttattctgttgtattcttttttttaaattgtaacatatttatccggtgggtgggacaggagtgtgttcaagtgggtcatgtttttgctgtggtgacacatggtacaggcttggagcttgcaggtccctttctactgtggtgttggagcaggacaataaagtccactagaaatgcacccca

SEQ ID NO: 280 - DNA, 60 bp, Homo sapiens
acttgtgtcttgaaatctagaattatttcacgcagaattgtcactgtttgtcaggaagag

SEQ ID NO: 281 - DNA, 356 bp, Homo sapiens
cagggcgtaccatgggattatatttgaatgtgtggtgcatccttcctggatgaaggatgtgtgagggaccttgaacctcagctgtattaaactgtagcgcctccagtcagtgcactagatgaaacttttagacaccctgaattctgttggttcctttcttttcctttatgtagcagcctccagcatgaatgcacgcacacgccagtgatggcattaagccatggccaccacgatttgcaaatgttctctcccaagctggagctgctcttgcctctcgaatgctattattaagggtttataatacttaatttaattttcgaactgaccaatgcaaggctctattaaaaagaaagttt

SEQ ID NO: 282 - DNA, 60 bp, Homo sapiens
ggattatatttgaatgtgtggtgcatccttcctggatgaaggatgtgtgagggaccttga

SEQ ID NO: 283 - DNA, 798 bp, Homo sapiens
  misc_feature 489: n = A,T,C or G
cgaggcaggtagatcacttgaggtcaggagttcgagactagcctggctaacatggggaaaccccatctctactaaaaatacaaaaattagctgggtgtggtggcacacgcttgtaatcccagctactcgggaggctgaggcagaagaattgcttgaacccaggaggcagaggttgcagtgagccaagatcccgccactgcactccagcctgggtgacagagagagactccatctcaagaaaagaaaaaaagaattcttatagctcttctatcctaagcattattcaagatacagagtacatactgaacaaatccaagttgacctatggaaagggatttaggttaagtatgaaggagaactatgtaactacaaattttcacaaacagtggaacaaattatttgaagtttttttctcttattaagcagtggttcttaacctttgtgagagttgcataagccctttgagtatctgatacaagacaatggttntgttcttctcctgcagaataatgtgtatgtttgcatgtacatatggttctccatatacataaaaggggcttgatgaaccccctaaaaactggttaagaaccttgcagtggaatttgcaggctagtatctgcaagagtgccaggcataaatacacctgcagtctcaggtctaaaggatgagaatttctcaaatcttgattatttgagatgttaggcttaaataactaatcatctagagttccacagatgctaactatgaagtttataaaattagagttgaatgatcttaatagaaagatcaatttcccaa

SEQ ID NO: 284 - DNA, 60 bp, Homo sapiens
tctgtcagcattttttaactaaaggtcacaacccattaacaaccatgaaattggtgttgg

SEQ ID NO: 285 - DNA, 1222 bp, Homo sapiens
ggcgggccagcggcggagccgtgtagcggagaagctccccctccctgcttcccttggccgagccgggggcgcgcgcgcacgcggccgtccagagcgggctccccacccctcgactcctgcgacccgcaccgcacccccacccgggcccggaggatgatgaagctcaagtcgaaccagacccgcacctacgacggcgacggctacaagaagcgggccgcatgcctgtgtttccgcagcgagagcgaggaggaggtgctactcgtgagcagtagtcgccatccagacagatggattgtccctggaggaggcatggagcccgaggaggagccaagtgtggcagcagttcgtgaagtctgtgaggaggctggagtaaaagggacattgggaagattagttggaatttttgagaaccaggagaggaagcacaggacgtatgtctatgtgctcattgtcactgaagtgctggaagactgggaagattcagttaacattggaaggaagagggaatggtttaaaatagaagacgccataaaagtgctgcagtatcacaaacccgtgcaggcatcatattttgaaacattgaggcaaggctactcagccaacaatggcaccccagtcgtggccaccacatactcggtttctgctcagagctcgatgtcaggcatcagatgactgaagacttcctgtaagagaaatggaaattggaaactagactgaagtgcaaatcttccctctcaccctggctctttccacttctcacaggcctcctctttcaaataaggcatggtgggcagcaaagaaagggtgtattgataatgttgctgtttggtgttaagtgatggggctttttcttctgtttttattgagggtgggggttgggtgtgtaatttgtaagtacttttgtgcatgatctgtccctccctcttcccacccctgcagtcctctgaagagaggccaacagccttcccctgccttggattctgaagtgttcctgtttgtcttatcctggccctggccagacgttttctttgatttttaattttttttttttattaaaagataccagtatgagatgaaaacttccaataatttgtcctataatgtgctgtacagttcagtagagtggtcactttcactgcagtatacatttatctacacattatatatcggacatataatatgtaaataaatgacttctagaaagaaaaaaaaaaaaaaaaaa

SEQ ID NO: 286 - DNA, 60 bp, Homo sapiens
tgagatgaaaacttccaataatttgtcctataatgtgctgtacagttcagtagagtggtc

SEQ ID NO: 287 - DNA, 5963 bp, Homo sapiens
gtgagaaggcggcggcggcggcggagtagcagccggacgagacgtcccagcggctcaggcgctgcccagcgccggccctggcagggagcctggtggggtggcggagggggagactgtgccgtggagggcctcgccatgtcctgctgcccgacttccttgtgaaacctcctagtagaaaaagttcttgggacaaacttcatttgacttcaccataagggaaagaagagagccttgttggacactgaagaagggacggggatttctcctcctaatctgggcctcttgtcatggatgaagagactcggcacagccttgagtgcatccaggccaatcagatctttcccaggaagcagctgatccgggaggatgagaatcttcaggttcctttccttgaacttcatggagagagcacagagtttgtgggccgtgccgaggatgccatcattgccctttccaattacagacttcacatcaagttcaaggagtctcttgttaatgttccattacagcttatagaaagtgttgaatgccgagatatatttcagcttcatttgacttgcaaagactgcaaagttatcaggtgtcagttttcaacctttgagcagtgtcaagagtggctgaagagactgaacaacgcaatccgaccacctgctaaaatagaagatctcttctcatttgcataccatgcttggtgcatggaggtctatgccagtgaaaaagagcaacatggagacctgtgcagaccaggggagcatgtaacttcaaggtttaaaaacgaggtggagaggatgggttttgatatgaacaacgcctggaggatttccaacatcaatgagaagtacaaattatgtggtagctatcctcaagagctcatagtgcctgcctggatcactgacaaagaactggaaagtgtatcaagtttcaggtcctggaagcgcatccctgccgtcatctacaggcaccagagcaatggagctgtcattgcccgctgtggacagccagaggttagctggtggggctggcgaaatgcagatgatgagcatctggtacagtcagtagccaaagcttgtgcctctgactcccgatcgagtggcagcaagctgtcaactaggaacacttctcgagactttcccaatgggggagacctttctgacgtggagttcgattcttctctgtcaaatgcttcaggagcagagagtttagccatccaaccgcagaagcttttgatcttggatgcacgctcctatgcagctgctgtggcaaaccgagccaaaggaggaggctgcgaatgcccagagtattacccaaactgtgaagttgtgtttatggggatggcaaacattcattctattcggaggagttttcagtctctgcggttgctgtgcactcagatgccagatccgggaaattggctatcagctcttgaaagcacaaaatggctccatcacttgtctgtgcttctgaaatcagcgcttctggtagtgcatgctgtggatcaggatcagcggccggtgctagtacactgctcagatggctgggaccgcaccccccagattgtggcattggctaagctcttgctggacccttattaccgaaccatagagggtttccaggtcctcgtggaaatggagtggctggattttggccataaatttgctgaccggtgtggtcatggggagaactcggatgatctgaatgaacgttgcccagtgtttctgcagtggcttgactgtgttcatcagcttcagaggcaatttccttgctcttttgagttcaatgaagcattccttgtgaaactggtgcagcatacctattcctgcctgtttggaacattcctgtgcaacaacgccaaggagagaggggaaaagcatactcaggaacggacatgttccgtgtggtcacttcttcgggcaggcaacaaggctttcaaaaacctactgtattcctctcagtcagaagccgtgctgtaccctgtgtgccatgtgcgtaacctgatgctgtggagtgcagtgtacctgccctgcccatccccaaccacccctgtggacgacagctgtgcaccatacccagccccaggcaccagccctgatgatccccccctgagccggctaccaaagactagatcatacgacaatctgaccacagcctgtgacaacacagtgcctctggccagccggcgctgcagcgaccccagcctgaacgagaagtggcaggagcaccggcgctcactagagctgagcagcctggctggccctggagaggatcccctttctgccgacagcctagggaagcccaccagagtgccggggggtgccgagctttctgttgcagccggagtagctgaggggcagatggagaacatcttgcaggaggccaccaaagaggagagtggagtagaggaacctgcccacagggcaggcattgagatacaggagggtaaagaggaccctctcttagaaaaggagagcaggaggaagacacctgaggcctcagccattggacttcaccaagacccagaactgggtgatgctgctctgaggagccatctggatatgagctggcctctgttctcacagggcatttctgaacagcagagtgggctcagtgttctcctcagttctctccaggtcccccccaggggagaggattccctggaggtccctgtggagcagtttcgaatagaagagattgcagagggtagggaggaagcagttcttccaatcccagtagatgcaaaagttggctatggtacctcacagtcatgttctctgctaccttcccaagtcccttttgagaccagaggaccaaacgtggacagttctacagacatgttagtggaagataaggtgaagtcagtaagtgggccccaaggtcatcatagatcttgccttgtaaatagtggcaaggacaggcttcctcagaccatggaacccagcccttcagagacaagcctggtcgagaggccccaagtggggtctgtggtgcataggacttcccttggcagcactctcagcctgacacgttccccttgtgccttgcctttagccgaatgtaaagaggggcttgtgtgcaatggtgccccagagactgaaaacagggcctcagagcagcccccaggtcttagcaccctccagatgtaccccacacccaatgggcattgcgccaatggggaggctggtaggagcaaggactcactgagccgtcagctgtctgctatgagctgcagctctgcccacttacactcaaggaacttgcaccacaagtggctgcatagccactcaggaaggccatctgcaaccagcagccccgaccagccttcccgcagccacctggacgatgatggcatgtcagtgtacacagacacgatccaacagcgcctgcgtcagattgagtcaggccaccagcaggaagtagaaactttgaagaaacaagtccaggagctgaagagtcgcctggagagccagtacctgaccagctccctacactttaatggagactttggggatgaggtgacttcaatccccgactcggaaagcaatctggatcagaactgtttgtctcgctgcagcacagagattttctctgaagccagctgggagcaggtggataaacaggacacagagatgacccgttggcttcctgaccacctggccgcccactgctatgcgtgcgacagtgccttctggcttgccagcaggaagcaccactgcaggaattgtgggaacgtattctgctccagttgttgtaaccagaaggttccagttcccagccagcagctctttgaacccagtcgagtatgcaagtcttgctatagcagcctacatcccacaagctccagcattgaccttgaactggataagcccattgctgccacttccaactgaagctcagtgacctgggtgggcagtggccaagctgctgttcctatgacaggcccactcaacctgggcagaccgagaggcccgtgcactttggaatgggagcgtggaaccacctgtacagagtgacagatttgggatgcaccactggattgtagattgatttttctttcctgtccccctactccctccctaccttttccatcctcctcctctgccttcaaaaaaggaaactttcccttggttgtcttaattttttttttttttgatggaagaccaagggttgccaggcccactgtaactgccgagctgcctgctgtcacgtgacactgagggatggcttgtttcttccgggtgggaggatggtggtcagagccaggagtatggagatctgagaccgtgagcagggaagaaagccagtgctaacatgcaaccattcctcacgccaccgccacatcagagctggttgggaaccctttgctgctggggaggctggaagcatattccccaagagcactgccctgggcatcatctccctcctgcgaggagctgagccagtcccctcacagatggataaatgaggctgatgtttggagggagaggcacacggtaaatggcatccccttaggcgcctctttgggaaaggaaagtggatgctcctttgaggcaggcgaggggctgggagtgggtagccgtcatgttgtcccccgtgggatcccatttttaacttgacccagattgtcttgggctccttttactttcagggggctgctttcctgggccaggctgtgtagcacttcccaccctcaggcatgagtacagactggtcaaaatgtttatgcagtcaaggccaaagcctgccctgagcccagacacacctgggtccccattctggggcctggtcccctaaacaatctcttcctcagccagcacagggaaatccagactcagggttccagaaatcccccgttcccaaaccaaaccaatcatggatcttccctttaaggggtagaatcagcctttagagttacaagcccctggaaaagggagcaggtcccatacaatcagcctttctcctcttctcttcttgggacaggaataactgctgagcagtccccctttgccactcctggctgtctgagtgggcacttgtctggctgctggccagcagtgaagggccacttggtgacttcgtagggttccttagagaagtgacatggccttgaggagattcagggcacctttcctcagtgagctttgatatggtccaaaaacagccttaaatcaagaatatttgtggaggtaggtgtggggaaggttggagaagagttaggtttgtgctttgtaatcttggcatccatgttttgtgcctgccctccctcttggggaggccatgcttgactctgctgaaagctgctaactggtgacagggtggatcatggtgaggactaggggtaaggtcagggaatgcttaagctctggccctgccctgtattcctcttccccttggtagcagttccctgaccaagggcaaggtgtgtctcaggaaggtggttctgtgcatgcctgggtgtggttaaggcgtggcccagaaggcttccctggtgctctcagtccaggcaaagcccagagcatctgagcacgtctctgacttccagtggcaacacagtttgaacgtggtgaaacagggtgtagttcttttccacattctgtgtcatctagtcgtgcaggtagggaaaaagttggtctaattgaagattgtgcatttcctagtgacaggtgccaagaggttatgatacgggtttcttgggtctgatgtacagtgtgaataaatgcttgcagctcttagctcttttttgatcgatgaagcacttttttattaatattttcctttgttaaaggaggaaccgtaactctccatagctgtacatataacccttttctcctaaagaggagtcagtcagtgctcctatatttttcattttttgtcaaagcaagaagtaaatactttagaattgttaaatatataaataaagcaaataaagttgagtgttccacatggtagcatttgctaacacttcctaa

SEQ ID NO: 288 - DNA, 60 bp, Homo sapiens
attaatattttcctttgttaaaggaggaaccgtaactctccatagctgtacatataaccc

SEQ ID NO: 289 - DNA, 5496 bp, Homo sapiens
attcagccggtgcgcgcggcggcgggaggcagtggctggggagtcccgtcgacgctctgttccgagagcgtgccccggaccgccagctcagaacaggggcagccgtgtagccgaacggaagctgggagcagccgggactggtggcccgcgcccgagctccgcaggcgggaagcaccctggatttgggaagtcccgggagcagcgcggcggcacctccctcacccaaggggccgcggcgacggtcacggggcgcggcgccaccgtgagcgacccaggccaggattctaaatagacggcccaggctcctcctccgcccgggccgcctcacctgcgggcattgccgcgccgcctccgccggtgtagacggcacctgcgccgccttgctcgcgggtctccgcccctcgcccaccctcactgcgccaggcccaggcagctcacctgtactggcgcgggctgcggaagcctgcgtgagccgaggcgttgaggcgcggcgcccacgccactgtcccgagaggacgcaggtggagcgggcgcggcttcgcggaacccggcgccggccgccgcagtggtcccagcctacaccgggttccggggacccggccgccagtgcccggggagtagccgccgccgtcggctgggcaccatgaacagcagcagcgccaacatcacctacgccagtcgcaagcggcggaagccggtgcagaaaacagtaaagccaatcccagctgaaggaatcaagtcaaatccttccaagcggcatagagaccgacttaatacagagttggaccgtttggctagcctgctgcctttcccacaagatgttattaataagttggacaaactttcagttcttaggctcagcgtcagttacctgagagccaagagcttctttgatgttgcattaaaatcctcccctactgaaagaaacggaggccaggataactgtagagcagcaaatttcagagaaggcctgaacttacaagaaggagaattcttattacaggctctgaatggctttgtattagttgtcactacagatgctttggtcttttatgcttcttctactatacaagattatctagggtttcagcagtctgatgtcatacatcagagtgtatatgaacttatccataccgaagaccgagctgaatttcagcgtcagctacactgggcattaaatccttctcagtgtacagagtctggacaaggaattgaagaagccactggtctcccccagacagtagtctgttataacccagaccagattcctccagaaaactctcctttaatggagaggtgcttcatatgtcgtctaaggtgtctgctggataattcatctggttttctggcaatgaatttccaagggaagttaaagtatcttcatggacagaaaaagaaagggaaagatggatcaatacttccacctcagttggctttgtttgcgatagctactccacttcagccaccatccatacttgaaatccggaccaaaaattttatctttagaaccaaacacaaactagacttcacacctattggttgtgatgccaaaggaagaattgttttaggatatactgaagcagagctgtgcacgagaggctcaggttatcagtttattcatgcagctgatatgctttattgtgccgagtcccatatccgaatgattaagactggagaaagtggcatgatagttttccggcttcttacaaaaaacaaccgatggacttgggtccagtctaatgcacgcctgctttataaaaatggaagaccagattatatcattgtaactcagagaccactaacagatgaggaaggaacagagcatttacgaaaacgaaatacgaagttgccttttatgtttaccactggagaagctgtgttgtatgaggcaaccaacccttttcctgccataatggatcccttaccactaaggactaaaaatggcactagtggaaaagactctgctaccacatccactctaagcaaggactctctcaatcctagttccctcctggctgccatgatgcaacaagatgagtctatttatctctatcctgcttcaagtacttcaagtactgcaccttttgaaaacaactttttcaacgaatctatgaatgaatgcagaaattggcaagataatactgcaccgatgggaaatgatactatcctgaaacatgagcaaattgaccagcctcaggatgtgaactcatttgctggaggtcacccagggctctttcaagatagtaaaaacagtgacttgtacagcataatgaaaaacctaggcattgattttgaagacatcagacacatgcagaatgaaaaatttttcagaaatgatttttctggtgaggttgacttcagagacattgacttaacggatgaaatcctgacgtatgtccaagattctttaagtaagtctcccttcataccttcagattatcaacagcaacagtccttggctctgaactcaagctgtatggtacaggaacacctacatctagaacagcaacagcaacatcaccaaaagcaagtagtagtggagccacagcaacagctgtgtcagaagatgaagcacatgcaagttaatggcatgtttgaaaattggaactctaaccaattcgtgcctttcaattgtccacagcaagacccacaacaatataatgtctttacagacttacatgggatcagtcaagagttcccctacaaatctgaaatggattctatgccttatacacagaactttatttcctgtaatcagcctgtattaccacaacattccaaatgtacagagctggactaccctatggggagttttgaaccatccccataccccactacttctagtttagaagattttgtcacttgtttacaacttcctgaaaaccaaaagcatggattaaatccacagtcagccataataactcctcagacatgttatgctggggccgtgtcgatgtatcagtgccagccagaacctcagcacacccacgtgggtcagatgcagtacaatccagtactgccaggccaacaggcatttttaaacaagtttcagaatggagttttaaatgaaacatatccagctgaattaaataacataaataacactcagactaccacacatcttcagccacttcatcatccgtcagaagccagaccttttcctgatttgacatccagtggattcctgtaattccaagcccaattttgaccctggtttttggattaaattagtttgtgaaggattatggaaaaataaaactgtcactgttggacgtcagcaagttcacatggaggcattgatgcatgctattcacaattattccaaaccaaattttaatttttgcttttagaaaagggagtttaaaaatggtatcaaaattacatatactacagtcaagatagaaagggtgctgccacggagtggtgaggtaccgtctacatttcacattattctgggcaccacaaaatatacaaaactttatcagggaaactaagattcttttaaattagaaaatattctctatttgaattatttctgtcacagtaaaaataaaatactttgagttttgagctactggattcttattagttccccaaatacaaagttagagaactaaactagtttttcctatcatgttaacctctgcttttatctcagatgttaaaataaatggtttggtgctttttataaaaagataatctcagtgctttcctccttcactgtttcatctaagtgcctcacatttttttctacctataacactctaggatgtatattttatataaagtattctttttcttttttaaattaatatctttctgcacacaaatattatttgtgtttcctaaatccaaccaattttcattaattcaggcatattttaactccactgcttacctactttcttcaggtaaaagggcaaataatgatcgaaaaaataattatttattacataatttagttgtttctagactataaatgttgctatgtgccttatgttgaaaaaatttaaaagtaaaatgtctttccaaattatttcttaattattataaaaatattaagacaatagcacttaaattcctcaacagtgttttcagaagaaataaatataccactctttacctttattgatatctccatgatgatagttgaatgttgcaatgtgaaaaatctgctgttaactgcaaccttgtttattaaattgcaagaagctttatttctagctttttaattaagcaaagcacccatttcaatgtgtataaattgtctttaaaaactgttttagacctataatccttgataatatattgtgttgactttataaatttcgcttcttagaacagtggaaactatgtgtttttctcatatttgaggagtgttaagattgcagatagcaaggtttggtgcaaagtattgtaatgagtgaattgaatggtgcattgtatagatataatgaacaaaattatttgtaagatatttgcagtttttcattttaaaaagtccataccttatatatgcacttaatttgttggggctttacatactttatcaatgtgtctttctaagaaatcaagtaatgaatccaactgcttaaagttggtattaataaaaagacaaccacatagttcgtttaccttcaaactttaggtttttttaatgatatactgatcttcattaccaataggcaaattaatcaccctaccaactttactgtcctaacatggactttcaaaaagaaaaaatgacaccatcttttattctttttttttttttttttttgagagagagtcttactctgccgcccaaactggagtgcagtggcacaatcttggctcactgcaacctctacctcctgggttcaagtgattctcttgcctcagcctcccgagttgctgggattgcgggcatggtggcgtgagcctgtagtcctagctactcgggaggctgaggcaggagaatagcctgaacctgggaatcggaggttgcagggccaagatcgccccactgcactccagcctggcaatagaccgagctccgtctccaaaaaaaaaaatacaatttttatttcttttactttttttagtaagttaatgtatataaaaatggcttcggacaaaatatctctgagttctgtgtattttcagtcaaaactttaaacctgtagaatcaatttaagtgttgaaaaaaatttgtctgaaacatttcataatttgtttccagcatgaggtatctaaggatttagaccagaggtctagattaatactctatttttacatttaaaccttttattataagtcttacataaaccatttttgttactctcttccacatgttactggataaattgtttagtggaaaataggctttttaatcatgaatatgatgacaatcagttatacagttataaaattaaaagtttgaaaagcaatattgtatatttttatctatataaaataactaaaatgtatctaagaataataaaatcacgttaaacc

SEQ ID NO: 290 - DNA, 60 bp, Homo sapiens
aatggcttcggacaaaatatctctgagttctgtgtattttcagtcaaaactttaaacctg

SEQ ID NO: 291 - DNA, 1719 bp, Homo sapiens
ctttccgcgcggcggaagagcgcgcgccagcttcggcacacttgggagccggatcccagccctacgcctcgtcccctacaagctcctccaagccccgccggctgctgtgggagcggcggccgtcctctcctggaggtcgtctcctggcatcctcggggccgcaggaaggaagaggaggcagcggccggagccctggtgggcggcctgaggtgagagcccgaccggcccctttgggaatatggcgaccggtggctaccggaccagcagcggcctcggcggcagcaccacagacttcctggaggagtggaaggcgaaacgcgagaagatgcgcgccaagcagaaccccccgggcccggcccccccgggagggggcagcagcgacgccgctgggaagccccccgcgggggctctgggcaccccggcggccgccgctgccaacgagctcaacaacaacctcccgggcggcgcgccggccgcacctgccgtccccggtcccgggggcgtgaactgcgcggtcggctccgccatgctgacgcgggcgcccccggcccgcggcccgcggcggtcggaggacgagcccccagccgcctctgcctcggctgcaccgccgccccagcgtgacgaggaggagccggacggcgtcccagagaagggcaagagctcgggccccagtgccaggaaaggcaaggggcagatcgagaagaggaagctgcgggagaagcggcgctccaccggcgtggtcaacatccctgccgcagagtgcttagatgagtacgaagatgatgaagcagggcagaaagagcggaaacgagaagatgcaattacacaacagaacactattcagaatgaagctgtaaacttactagatccaggcagttcctatctgctacaggagccacctagaacagtttcaggcagatataaaagcacaaccagtgtctctgaagaagatgtctcaagtagatattctcgaacagatagaagtgggttccctagatataacagggatgcaaatgtttcaggtactctggtttcaagtagcacactggaaaagaaaattgaagatcttgaaaaggaagtagtaacagaaagacaagaaaacctaagacttgtgagactgatgcaagataaagaggaaatgattggaaaactcaaagaagaaattgatttattaaatagagacctagatgacatagaagatgaaaatgaacagctaaagcaggaaaataaaactcttttgaaagttgtgggtcagctgaccaggtagaggattcaagactcaatgtggaaaaaatattttaaactactgattgaatgttaatggtcaatgctagcacaatattcctatgctgcaatacattaaaataactaagcaagtatatttatttctagcaaacagatgtttgttttcaaaatacttctttttcattattggttttaaaaaagcattatccttttatctcacaaataagtaatatctttcagttattaaatgatagataatgcctttttggttttgtgtggtattcaactaatacatggtttaaagtcacagccgtttgaatatattttatcttggtagtacattttctcccttaggaatatacatagtctttgtttacatgagttccaatacttttgggatgttaccctcacatgtccctatactgatgtgtgccaccttttatgtgttgatgactcactcataaggttttggtc

SEQ ID NO: 292 - DNA, 60 bp, Homo sapiens
tacatgagttccaatacttttgggatgttaccctcacatgtccctatactgatgtgtgcc

SEQ ID NO: 293 - DNA, 2136 bp, Homo sapiens
gccctggaggcccggcctggccgctcccggccctggggtgcacatcggccctgagtcccgtcccaggctctgggctcgggcagccgccgccaccgctgcccaggacgtcgggcctcctgccttcctcccaggcccccacgttgctggccgcctggccgagtggccgccatgctcctgccttgggccacctctgcccccggcctggcctgggggcctctggtgctgggcctcttcgggctcctggcagcatcgcagccccaggcggtgcctccatatgcgtcggagaaccagacctgcagggaccaggaaaaggaatactatgagccccagcaccgcatctgctgctcccgctgcccgccaggcacctatgtctcagctaaatgtagccgcatccgggacacagtttgtgccacatgtgccgagaattcctacaacgagcactggaactacctgaccatctgccagctgtgccgcccctgtgacccagtgatgggcctcgaggagattgccccctgcacaagcaaacggaagacccagtgccgctgccagccgggaatgttctgtgctgcctgggccctcgagtgtacacactgcgagctactttctgactgcccgcctggcactgaagccgagctcaaagatgaagttgggaagggtaacaaccactgcgtcccctgcaaggcagggcacttccagaatacctcctcccccagcgcccgctgccagccccacaccaggtgtgagaaccaaggtctggtggaggcagctccaggcactgcccagtccgacacaacctgcaaaaatccattagagccactgcccccagagatgtcaggaaccatgctgatgctggccgttctgctgccactggccttctttctgctccttgccaccgtcttctcctgcatctggaagagccacccttctctctgcaggaaactgggatcgctgctcaagaggcgtccgcagggagagggacccaatcctgtagctggaagctgggagcctccgaaggcccatccatacttccctgacttggtacagccactgctacccatttctggagatgtttccccagtatccactgggctccccgcagccccagttttggaggcaggggtgccgcaacagcagagtcctctggacctgaccagggagccgcagttggaacccggggagcagagccaggtggcccacggtaccaatggcattcatgtcaccggcgggtctatgactatcactggcaacatctacatctacaatggaccagtactggggggaccaccgggtcctggagacctcccagctacccccgaacctccataccccattcccgaagagggggaccctggccctcccgggctctctacaccccaccaggaagatggcaaggcttggcacctagcggagacagagcactgtggtgccacaccctctaacaggggcccaaggaaccaatttatcacccatgactgacggagtctgagaaaaggcagaagaaggggggcacaagggcactttctcccttgaggctgccctgcccacgtgggattcacaggggcctgagtagggcccggggaagcagagccctaagggattaaggctcagacacctctgagagcaggtgggcactggctgggtacggtgccctccacaggactctccctactgcctgagcaaacctgaggcctcccggcagacccacccaccccctggggctgctcagcctcaggcacggacagggcacatgataccaactgctgcccactacggcacgccgcaccggagcacggcaccgagggagccgccacacggtcacctgcaaggacgtcacgggcccctctaaaggattcgtggtgctcatccccaagcttcagagaccctttggggttccacacttcacgtggactgaggtagaccctgcatgaagatgaaattatagggaggacgctccttccctcccctcctagaggagaggaaagggagtcattaacaactagggggttgggtaggattcctaggtatggggaagagttttggaaggggaggaaaatggcaagtgtatttatattgtaaccacatgcaaataaaaagaatgggacctaaactcgtgccgctcgtgccgaattcctgcag

SEQ ID NO: 294 - DNA, 60 bp, Homo sapiens
atttatattgtaaccacatgcaaataaaaagaatgggacctaaactcgtgccgctcgtgc

SEQ ID NO: 295 - DNA, 1351 bp, Homo sapiens
ccgcttagacaatgccccggagccgccagaccgtcgcgcccctgccccatcgtagtatatgagctcgcctacacaaggacccccgctaaaagccagagctcccagtccccgaggcttgaagacggggactcccttctccaccaactctgtcctcggggggtggggccccagccgagatcacagcgcgacaggagtgggggtggccgctggagacaggtgaagaaacaagaaaactaagaaatccgagcggttggagggggagtctgtgtggatgggatggggacgccgggggaggggctgggccgctgctcccatgccctgatccggggagtcccagagagcctggcgtcgggggaaggtgcgggggctggccttcccgctctggatctggccaaagctcaaagggagcacggggtgctgggaggtaaactgaggcaacgactggggctacagctgctagaactgccacctgaggagtcattgccgctgggaccgctgcttggcgacacggccgtgatccaaggggacacggccctaatcacgcggccctggagccccgctcgtaggccagaggtcgatggagtccgcaaagccctgcaagacctggggctccgaattgtggaaataggagacgagaacgcgacgctggatggcactgacgttctcttcaccggccgggagtttttcgtaggcctctccaaatggaccaatcaccgaggagctgagatcgtggcggacacgttccgggacttcgccgtctccactgtgccagtctcgggtccctcccacctgcgcggtctctgcggcatggggggacctcgcactgttgtggcaggcagcagcgacgctgcccaaaaggctgtccgggcaatggcagtgctgacagatcacccatatgcctccctgaccctcccagatgacgcagctgctgactgcctctttcttcgtcctgggttgcctggtgtgccccctttcctcctgcaccgtggaggtggggatctgcccaacagccaggaggcactgcagaagctctctgatgtcaccctggtacctgtgtcctgctcagaactggagaaggctggcgccgggctcagctccctctgcttggtgctcagcacacgcccccacagctgagggcctggccttggggtactgctggccaggggtaggatagtataggaagtagaaggggaaggagggttagatagagaatgctgaataggcagtagttgggagagagcctcaatattgggggaggggagagtgtagggaaaaggatccactgggtgaatcctccctctcagaaccaataaaatagaattgaccttttaaaaaaaaaaaaaaaaaaaaa

SEQ ID NO: 296 - DNA, 60 bp, Homo sapiens
gatccactgggtgaatcctccctctcagaaccaataaaatagaattgaccttttaaaaaa

SEQ ID NO: 297 - DNA, 1817 bp, Homo sapiens
ggcacgagctgaattgcgcgtggtggccatggcggccagcggggctgtggaaccagggcccccgggggctgccgtcgccccgtcgcccgccccggccccgccgcctgcccctgatcacctgttccggcccatcagcgccgaggacgaggagcagcagcccaccgagatcgagtcgctatgcatgaactgttactgcaatggcatgacgcgcctcctgctcaccaagattcccttcttcagagaaataatagtgagctccttttcctgcgagcactgtggctggaacaacacggagatccagtcggcaggcaggatccaggaccagggagtgcgctacactttgtctgtcagggctctggaggacatgaacagagaagtggtgaagactgactctgctgccacaaggattcctgagctagattttgaaattcctgcctttagccagaaaggagctctgaccactgttgaaggattgatcacccgtgctatctctggcctggagcaggaccagcctgcacgaagggcaaacaaagatgctacagctgaaagaattgatgagttcattgtcaaactgaaggagctaaagcaagtagcctcccctttcactctgatcattgatgatccctcagggaacagttttgtggaaaacccacatgctcctcagaaagatgatgccctggtgatcacacactacaaccggacccgacagcaggaagagatgctggggcttcaagaagaagcaccagcagagaagccagaagaggaagatctcagaaatgaagtgctccagttcagcacaaactgcccagaatgcaatgcccccgctcagaccaacatgaagctagtacaaatccctcactttaaggaggttatcatcatggctaccaactgcgagaactgtgggcatcggaccaatgaggtgaaatctggaggagcagtagaacccttgggcaccaggatcaccctccacatcacagatgcctcagatatgaccagagacctcctcaagtctgagacttgcagtgtggaaatcccagagctagaatttgaactgggaatggcagtcctcgggggcaagttcaccacactggaagggctgctgaaagacatccgggaactggtgaccaaaaatcctttcacactgggcgacagttccaatcctggacagacggagagactacaggagtttagccagaagatggaccagatcatcgaaggtaacatgaaggcccactttattatggatgatccagcaggaaacagttacttgcagaatgtgtatgcgcctgaagatgatcctgagatgaaggtggagcgttacaagcgcacctttgaccaaaatgaggagctagggctcaatgacatgaagacagagggctatgaggcaggcctggctccgcaacggtagcagtgggtggctcaagggccagcctccagcgctgctctttctgtaggttatttattagtattggatgaaggcgaaggctgggagtgtctttcccaccagcccttgcccatggtggggaggacatctggtttgagtcagagatctgtgcacactttttaaacagcttgtgatgcaagtgtgagcctattgtgttacttgaccttattttggaagttttgaattggcctaggaggaaacccagaaatgaaccaggggtatgtcatcacttttttcatatcaagtcctcaccctccttccacataatgctttatcctttaaggttggaactttgaagttggagaaggtggaataaagttacacctggaaaaaaaaaaaaaaaaaaaaaaaaaaaaaaaaaaaaaaaaaaaaa

SEQ ID NO: 298 - DNA, 60 bp, Homo sapiens
tttgagtcagagatctgtgcacactttttaaacagcttgtgatgcaagtgtgagcctatt

SEQ ID NO: 299 - DNA, 3078 bp, Homo sapiens
ggactctcaaaagccaagagtcaagtttttaaaaatcaagatccggtgctaccccctcgtcccaaaccaggacaccctctctacagtaaatacatgctgtctgtgcctcatggaattgccaatgaagatattgtctctcaaaaccccggagaactctcttgtaagcgtggggatgtacttgtgatgctgaagcagacggaaaataattacttggagtgccaaaagggagaagacactggcagagttcacctgtctcaaatgaagattatcactccacttgatgaacatcttagaagcagaccaaacgatccaagccacgctcagaagcctgttgacagtggtgctcctcatgctgtcgttcttcatgatttcccagcagagcaagttgatgatttgaacctcacttctggagaaattgtttatcttctggagaagatagatacagattggtacagagggaactgtagaaaccagattggcatatttcctgccaactatgtcaaagtgattattgatatcccagaaggaggaaatgggaaaagagaatgtgtttcatctcattgtgttaaaggctcaagatgtgttgctcggtttgaatatattggagagcagaaggatgagttgagtttctcagagggagaaattattattcttaaagagtatgtgaatgaggaatgggccagaggagaagttcgaggcagaactgggattttccccctgaactttgtggagcctgttgaggattatcccacctctggtgcaaatgttttaagcacaaaggtaccactgaaaaccaaaaaagaagattctggctcaaactctcaggttaacagtcttccggcagaatggtgtgaagctcttcacagttttacagcagagaccagtgatgacttatcattcaagaggggagaccggatccagattctggaacgtctggattctgactggtgcaggggcagactgcaggacagggaggggatcttcccagcagtgtttgtgaggccctgcccagctgaggcaaaaagtatgttggccatagtaccgaaggggaggaaggccaaagccttatatgatttccgaggggagaatgaagatgaactttccttcaaggctggagatataataacagagctggaatctgtagatgatgactggatgagtggagaacttatgggaaaatctggaatatttcccaaaaactacatacagtttctacagatcagctagaggagaagcttgtctgtgttccttggcacaagaactcacttgaactatcaccttgactatcagatatgtttttgcactattttttttaactgaaaaagaaatatctaagctgtacatggtacactagaattttctgaaagcagaaaacgttcagattttgtagttaattttcattacaatagaaacacgcacatggaaacccatgagctaggattctaccgaggaaaacatctagtgggattagcaaggtgaagggaaagcatctggtggcatggcagcatggggaggctcacacacagaagttgcacgtggacatctgttttaatcagcacaagtgaattaaccatgcttcttcattttttttactttagttaaaaaagaggacatttaatattctacatgctgtaactatcaggacatggttagcaatctcaatttcatttttgatattcaaattaattcttacagcttgagcatatcagccttattaccagagcaaatccttccttcagatgggatagtttactgactagttggagcatttgtaagcacatggtgaaatcagcccctgcccaccaaaataatctttatgttaccaagtgattcccatttgtctaaggatttgaagggggtctaaattggatgtatcttagtctaaagaaccaaaaccatccctgaaatgccttgctaatacaactaatccttccatatatgtgccatacttatttttttcctcagtgtatactttatgttaacagggttattacaaagcacattttctgaatctgcaatcattcctttgacaattactggacccaaaggaaaattcattttctttgcattattccagtaatatataaaaactgtgtcttgttatagtagtacattatgaatcacatataaaatcttacaatacagaacaactgttaagatggaaaacagtgccaaacctccacagctcatttctttgtaatataatcagaatgaaaaataatttaagaggacagaagactggtacttttttgttttattttttctctagcttatccctgcacaattattagagtgaatgaaaaaccactttcctgctttccattgttataaattctaagcttaagataaaagtggttctttacatgactgaatcaattacaatttatgggctagagccaaataggttgaagacaatcatccaaacagatcaatggaatagaatttcattggaaatgtaaaacactttcccaacaatggtcatgactttcttctgtttttgagaagagtttcatatgctggaccacattttagcttttattgttttttttttcccattgtccaaaaagttaagcaacaagtggccacacttttacgtgactacaacctggagttctgcaaagaaggtaatatttacttggtctttgactaaagttatctccccattctatggttacattttattttggactatggggacttctaatacgttttggtaaagaagagagtataaagaaaattcttgtcaaatttcactcaaaagtaatttcatgagaaatcaatgatttaaagcattatccaaattaaattatcatttgcagcaaactgtacaacagcaggaaggatatggaatggaacatgaggtatatatctttgcctttataattttaacatcttatattgaagattctgaaaacctatctttattagaggaaaatctcaatcttcagttttggccttctgtcaccagaatgataagtgcaatagttgtaaatctacttgacactgtaataaactgaactgaactttcaaaaaaaaaaaaaaaaaaaaaaaaaaaaaaaaaaaaaaaaaaaaaaaagg

SEQ ID NO: 300 - DNA, 60 bp, Homo sapiens
ggactatggggacttctaatacgttttggtaaagaagagagtataaagaaaattcttgtc

SEQ ID NO: 301 - DNA, 5137 bp, Homo sapiens
gcacagtctgtctcttcgccggttcccggccccgtggatcctacttctctgtcgcccgcggttcgccgccccgctcgccgccgcgatgccagtgtttcatacgcgcacgatcgagagcatcctggagccggtggcacagcagatctcccacctggtgataatgcacgaggagggcgaggtggacggcaaagccattcctgacctcaccgcgcccgtggccgccgtgcaggcggccgtcagcaacctcgtccgggttggaaaagagactgttcaaaccactgaggatcagattttgaagagagatatgccaccagcatttattaaggttgagaatgcttgcaccaagcttgtccaggcagctcagatgcttcagtcagacccttactcagtgcctgctcgagattatctaattgatgggtcaaggggcatcctctctggaacatcagacctgctccttaccttcgatgaggctgaggtccgtaaaattattagagtttgcaaaggaattttggaatatcttacagtggcagaggtggtggagactatggaagatttggtcacttacacaaagaatcttgggccaggaatgactaagatggccaagatgattgacgagagacagcaggagctcactcaccaggagcaccgagtgatgttggtgaactcgatgaacaccgtgaaagagttgctgccagttctcatttcagctatgaagatttttgtaacaactaaaaactcaaaaaaccaaggcatagaggaagctttaaaaaatcgcaattttactgtagaaaaaatgagtgctgaaattaatgagataattcgtgtgttacaactcacctcttgggatgaagatgcctgggccagcaaggacactgaagccatgaagagagcattggcctccatagactccaaactgaaccaggccaaaggttggctccgtgaccctagtgcctccccaggggatgctggtgagcaggccatcagacagatcttagatgaagctggaaaagttggtgaactctgtgcaggcaaagaacgcagggagattctgggaacttgcaaaatgctagggcagatgactgatcaagtggctgacctccgtgccagaggacaaggatcctcaccggtggccatgcagaaagctcagcaggtatctcagggtctggatgtgctcacagcaaaagtggaaaatgcagctcgcaagctggaagccatgaccaactcaaagcagagcattgcaaagaagatcgatgctgctcagaactggcttgcagatccaaatggtggaccggaaggagaagagcagattcgaggtgctttggctgaagctcggaaaatagcagaattatgtgatgatcctaaagaaagagatgacattctacgttcccttggggaaatatctgctctgacttctaaattagcagatctacgaagacaggggaaaggagattctccagaggctcgagccttggccaaacaggtggccacggccctgcagaacctgcagaccaaaaccaaccgggctgtggccaacagcagaccggccaaagcagctgtacaccttgagggcaagattgagcaagcacagcggtggattgataatcccacagtggatgaccgtggagtcggtcaggctgccatccgggggcttgtggccgaagggcatcgtctggctaatgttatgatggggccttatcggcaagatcttctcgccaagtgtgaccgagtggaccagctgacagcccagctggctgacctggctgccagaggggaaggggagagtcctcaggcacgagcacttgcatctcagctccaagactccttaaaggatctaaaagctcggatgcaggaggccatgactcaggaagtgtcagatgttttcagcgataccacaactcccatcaagctgttggcagtggcagccacggcgcctcctgatgcgcctaacagggaagaggtatttgatgagagggcagctaactttgaaaaccattcaggaaagcttggtgctacggccgagaaggcggctgcggttggtactgctaataaatcaacagtggaaggcattcaggcctcagtgaagacggcccgagaactcacaccccaggtggtctcggctgctcgtatcttacttaggaaccctggaaatcaagctgcttatgaacattttgagaccatgaagaaccagtggatcgataatgttgaaaaaatgacagggctggtggacgaagccattgataccaaatctctgttggatgcttcagaagaagcaattaaaaaagacctggacaagtgcaaggtagctatggccaacattcagcctcagatgctggttgctggggcaaccagtattgctcgtcgggccaaccggatcctgctggtggctaagagggaggtggagaattccgaggatcccaagttccgtgaggctgtgaaagctgcctctgatgaattgagcaaaaccatctccccaatggtgatggatgcaaaagctgtggctggaaacatttccgaccctggactgcaaaagagcttcctggactcaggatatcggatcctgggagctgtggccaaggtcagagaagccttccaacctcaggagcctgacttcccgccgcctccaccagaccttgaacaactccgactaacagatgagcttgctcctcccaaaccacctctgcctgaaggtgaggtccctccacctaggcctccaccaccagaggaaaaggatgaagagttccctgagcagaaggccggggaggtgattaaccagccaatgatgatggctgccagacagctccatgatgaagctcgcaaatggtccagcaagggcaatgacatcattgcagcagccaagcgcatggctctgctgatggctgagatgtctcggctggtaagagggggcagtggtaccaagcgggcactcattcagtgtgccaaggacatcgccaaggcctcagatgaggtgactcggttggccaaggaggttgccaagcagtgcacagataaacggattagaaccaacctcttacaggtatgtgagcgaatcccaaccataagcacccagctcaaaatcctgtccacagtgaaggccaccatgctgggccggaccaacatcagtgatgaggagtctgagcaggccacagagatgctggttcacaatgcccagaacctcatgcagtctgtgaaggagactgtgcgggaagctgaagctgcttcaatcaaaattcgaacagatgctggatttacactgcgctgggttagaaagactccctggtaccagtaggcacctggctgagcctggctggcacagaaacctctactaaaaagaaggaaaatgatctgagtcccaggagctgcccagagttgctgggagctgaaaaatcacatcctggcctggcacatcagaaaggaatgggggcctcttcaaattagaagacatttatactcttttttcatggacactttgaaatgtgtttctgtataaagcctgtattctcaaacacagttacacttgtgcaccctctatcccaataggcagactgggtttctagcccatggacttcacataagctcagaatccaagtgaacactagccagacactctgctctgcccttgttccctaggggacacttccctctgtttctctttccttggctcccattcactcttccagaatcccaagacccagggcccaggcaaatcagttactaagaagaaaattgctgtgcctcccaaaattgttttgagctttccatgttgctgccaaccataccttccttccctgggctgtgctacctgggtccttttcagaagtgagctttgctgctacaggggaaggtggcctctgtggagccccagcatatgggggcctggattcatttcctgcccttcctcagtttaatccttctagtttcccacaatataaaactgtacttcactgtcaggaagaaatcacagaatcatatgattctgcttttaccatgcccctgagcaatgtctgtgctagggaaactccccgtcccatatcctgcctcagcccgccaaggtagccatcccatgaacacactgtgtcctggtgctctctgccactggaagggcagagtagccagggtgtggccctgccatcttcccagcagggccactcccggcactccatgcttagtcactgcctgcagaggtctgtgctgaggccttatcattcattcttagctcttaattgttcattttgagctgaaatgctgcattttaattttaaccaaaacatgtctcctatatcctggtttttgtagccttcctccacatcctttctaaacaagattttaaagacatgtaggtgtttgttcatctgtaactctaaaagatcctttttaaattcagtcctaagaaagaggagtgcttgtcccctaagagtgtttaatggcaaggcagccctgtctgaaggacacttcctgcctaagggagagtggtatttgcagactagaattctagtgctgctgaagatgaatcaatgggaaatactactcctgtaattcctacctccctgcaaccaactacaaccaagctctctgcatctactcccaagtatggggttcaagagagtaatgggtttcatatttcttatcaccacagtaagttcctactaggcaaaatgagagggcagtgtttcctttttggtacttattactgctaagtatttcccagcacatgaaaccttattttttccaaagccagaaccagatgagtaaaggagtaagaaccttgcctgaacatccttccttcccacccatcgctgtgtgttagttcccaacatcgaatgtgtacaacttaagttggtcctttacactcaggctttcactatttcctttaaaatgaggatgattattttcaaggccctcagcatatttgtatagttgcttgcctgatataaatgcaatattaatgcctttaaagtatgaatctatgccaaagatcacttgttgttttactaaagaaagattacttagaggaaataagaaaaatcatgtttgctctcccggttcttccagtggtttgagacactggtttacactttatgccggatgtgcttttctccaatatcagtgctcgagacacagtgaagcaaattaaaaaaaa

SEQ ID NO: 302 - DNA, 60 bp, Homo sapiens
actaaagaaagattacttagaggaaataagaaaaatcatgtttgctctcccggttcttcc

SEQ ID NO: 303 - DNA, 1705 bp, Homo sapiens
ggctcactgcatctccggctcctggactcaagcgattctcctgcctcaggctcccaaggtggcagcacgcaaagggtgtccctgtccctcaaggggtcatggcctccatgttgctcgcccagcggctggcctgcagcttccagcacacgtaccgcctgctggtgcctggatccagacacattagtcaagctgcagccaaagtcgacgttgaatttgattatgatgggcctctgatgaagacggaagtcccagggcctagatctcaggagttaatgaaacagctgaatataattcagaatgcagaggctgtgcattttttctgcaattacgaagagagccgaggcaattacctggttgatgtggacggcaaccgaatgctggatctttattcccagatctcctctgttcccataggttacagcgacccggccctcgtgaaactcatccaacagccacaaaatgcgagcatgtttgtcaacagacccgccctcgaaatcctgcctccggagaactttgtggagaagctccggcagtccttgctctcggtggctcccaaagggatgtcccagctcatcaccatggcctgcggctcctgctccaatgaaaacgccttaaagaccatcttcatgtggtaccggagcaaggaaagagggcagaggggattctccaaagaggagctggagacgtgcatgattaaccaggccccctggtgccccgactacagcatcctctccttcatgggttccttccatgggaggaccatgggttgcttagcgaccacgcactctaaagccattcacaagatcgatatcccttcctttgactggcccatcgcaccgttcccacggctgaaataccctctggaagagtttgtgaaagagaaccaacaggaagaggccggctgtctggaagaggttgaggatctgattgtgaaatatcgaaaaaagaagaagacggtggccgggatcatcgtggagcccatccagtccgagggtggagacaaccatgcatccgatgacttctttcggaagctgagagacatcgccaggaagcactgctgcgccttcttggtggacgaggtccagaccggaggaggctgcacgggcaagttctgggcccatgagcactggggcctggatgacccagcagacgtgatgaccttcagcaagaagatgatgactgggggcttcttcctcaaggaggagttcaggcctaatgctccctaccggatcttcaacacgtggctgggggacccgtccaagaacctgttgctggctgaggtcatcaacatcatcaagcgggaggacctgctaaataatgcagcccatgccgggaaggccctgctcacaggactgctggacctccaggcccggtacccccagttcatcagcagggtgagaggacgaggcaccttttgctccttcgatactcccgatgattccatacggaataagctcattttaattgccagaaacaaaggtgtggtgttgggtggctgtggtgacaaatccattcgtttccgtcccacgctggtgttcagggatcaccacgctcacctgttcctcaatattttcagtgacatcttagcagacttcaagtaaagaagccatttccactacagtgagaaagcccggatcccaacagttgtcaaattgattagtttgcctaattcatgttttcacttaaaagtatcagaggtggaatt

SEQ ID NO: 304 - DNA, 60 bp, Homo sapiens
cacctgttcctcaatattttcagtgacatcttagcagacttcaagtaaagaagccatttc

SEQ ID NO: 305 - DNA, 1195 bp, Homo sapiens
cacgaggcggattcttggcgccggagaagaggcagggtcaccctctctccacgtcagagacctgactgtggagatggcggctcagaagataaacgaggggctggaacacctcgccaaagcagagaaatacctgaaaactggttttttaaaatggaagccagattatgacagtgccgcttctgaatatggaaaagcagctgttgcttttaaaaatgccaaacagtttgagcaagcaaaagatgcctgcctgagggaagctgttgcccatgaaaataatagggctctttttcatgctgccaaagcttatgagcaagctggaatgatgttgaaggagatgcagaaactaccagaggccgttcagctaattgagaaggccagcatgatgtatctagaaaacggcaccccagacacagcagccatggctttggagcgagctggaaagcttatagaaaatgttgatccagagaaggctgtacagttatatcaacagacagctaatgtgtttgaaaatgaagaacgcttacgacaggcagttgaattactaggaaaagcctccagactactagtacgaggacgtaggtttgatgaggcggcactctctattcagaaagaaaaaaatatttataaggaaattgagaattatccaacttgttataagaaaacaattgctcaagtcttagttcatctacacagaaatgactatgtagctgcagaaagatgtgtccgggagagctatagcatccctgggttcaatggcagtgaagactgtgctgccctggaacagcttcttgaaggttatgaccagcaagaccaagatcaggtgtcagatgtctgcaactcaccgcttttcaagtacatggacaatgattatgctaagctgggcctgagtttggtggttccaggagggggaatcaagaagaaatcacctgcaacaccacaggccaagcctgatggtgtcactgccacggctgctgatgaagaggaagatgaatactcaggaggactatgctagtattttgcttgctgaaaagaaaagggaaacaaaggtaaaatcctgacatgccatttcaaggacttgggaatagattagggatatccgtacttcattacagtcatgattttggatcctaataaagactagtttttagttaccatcttcccaaatcaaaaaaaaaaaaaaaaaaaaaaaaaaaaa

SEQ ID NO: 306 - DNA, 60 bp, Homo sapiens
ataagaaaacaattgctcaagtcttagttcatctacacagaaatgactatgtagctgcag

SEQ ID NO: 307 - DNA, 1607 bp, Homo sapiens
cgggggtctccatcctggaccaggacctggactacctgtccgaaggcctcgaaggccgatcccaaagccccgtggccctgctctttgatgcccttctacgcccagacacagactttgggggaaacatgaagtcggtcctcacctggaagcaccggaaggagcacgccatcccccacgtggttctgggccggaacctccccgggggagcctggcactccatcgaaggctccatggtgatcctgagccaaggccagtggatggggctcccggacctggaggtcaaggactggatgcagaagaagcgaagaggtcttcgcaacagccgggccactgccggggacatcgcccactactacagggactacgtggtcaagaagggtctggggcataactttgtgtccggtgctgtagtcacagccgtggagtgggggacccccgatcccagcagctgtggggcccaggactccagccccctcttccaggtgagcggcttcctgaccaggaaccaggcccagcagcccttctcgctgtgggcccgcaacgtggtcctcgccacaggcacgttcgacagcccggcccggctgggcatccccggggaggccctgcccttcatccaccatgagctgtctgccctggaggccgccacaagggtgggtgcggtgaccccggcctcagaccctgtcctcatcattggcgcggggctgtcagcggccgacgccgtcctctacgcccgccactacaacatcccggtgatccatgccttccgccgggccgtggacgaccctggcctggtgttcaaccagctgcccaagatgctgtaccccgagtaccacaaggtgcaccagatgatgcgggagcagtccatcctgtcgcccagcccctatgagggttaccgcagcctccccaggcaccagctgctgtgcttcaaggaagactgccaggccgtgttccaggacctcgagggtgtcgagaaggtgtttggggtctccctggtgctggtcctcatcggctcccaccccgacctctccttcctgcctggggcagggctgactttgcagtggatcctgaccagccgctgagcgccaagaggaaccccattgacgtggaccccttcacctaccagagcacccgccagagggcctgtacgccatggggccgctggcggggacaacttcgtgaggtttgtgcaggggggcgccttggctgtggccagctccctgctaagaaggagaccaggaagccaccctaacactcggccagacccgctggctcccaggccctgagaggacagagatgaccacatccctgctggatgcaggacccgtccaaagatgccccggggaggggtgtcagcccacgttgctggcctttggggtcaagaggagtagggatcccaggctgccctggacttagaccagtgtgtgaggttggacttagaccagtgtgtgaggtggtaacagcggccgcagcagggggttggcctagacctgggatttgtggggaaagctgctggtgtgaccagctgagcacccagccaggagacctgcagccctgcgccttccagaagcaggtcccaaataaagccagtgcccacctgaaaaaaaaaa

SEQ ID NO: 308 - DNA, 60 bp, Homo sapiens
ggacttagaccagtgtgtgaggttggacttagaccagtgtgtgaggtggtaacagcggcc

SEQ ID NO: 309 - DNA, 5341 bp, Homo sapiens
gcacagtctgtctcttcgccggttcccggccccgtggatcctacttctctgtcgcccgcggttcgccgccccgctcgccgccgcgatgccagtgtttcatacgcgcacgatcgagagcatcctggagccggtggcacagcagatctcccacctggtgataatgcacgaggagggcgaggtggacggcaaagccattcctgacctcaccgcgcccgtggccgccgtgcaggcggccgtcagcaacctcgtccgggttggaaaagagactgttcaaaccactgaggatcagattttgaagagagatatgccaccagcatttattaaggttgagaatgcttgcaccaagcttgtccaggcagctcagatgcttcagtcagacccttactcagtgcctgctcgagattatctaattgatgggtcaaggggcatcctctctggaacatcagacctgctccttaccttcgatgaggctgaggtccgtaaaattattagagtttgcaaaggaattttggaatatcttacagtggcagaggtggtggagactatggaagatttggtcacttacacaaagaatcttgggccaggaatgactaagatggccaagatgattgacgagagacagcaggagctcactcaccaggagcaccgagtgatgttggtgaactcgatgaacaccgtgaaagagttgctgccagttctcatttcagctatgaagatttttgtaacaactaaaaactcaaaaaaccaaggcatagaggaagctttaaaaaatcgcaattttactgtagaaaaaatgagtgctgaaattaatgagataattcgtgtgttacaactcacctcttgggatgaagatgcctgggccagcaaggacactgaagccatgaagagagcattggcctccatagactccaaactgaaccaggccaaaggttggctccgtgaccctagtgcctccccaggggatgctggtgagcaggccatcagacagatcttagatgaagctggaaaagttggtgaactctgtgcaggcaaagaacgcagggagattctgggaacttgcaaaatgctagggcagatgactgatcaagtggctgacctccgtgccagaggacaaggatcctcaccggtggccatgcagaaagctcagcaggtatctcagggtctggatgtgctcacagcaaaagtggaaaatgcagctcgcaagctggaagccatgaccaactcaaagcagagcattgcaaagaagatcgatgctgctcagaactggcttgcagatccaaatggtggaccggaaggagaagagcagattcgaggtgctttggctgaagctcggaaaatagcagaattatgtgatgatcctaaagaaagagatgacattctacgttcccttggggaaatatctgctctgacttctaaattagcagatctacgaagacaggggaaaggagattctccagaggctcgagccttggccaaacaggtggccacggccctgcagaacctgcagaccaaaaccaaccgggctgtggccaacagcagaccggccaaagcagctgtacaccttgagggcaagattgagcaagcacagcggtggattgataatcccacagtggatgaccgtggagtcggtcaggctgccatccgggggcttgtggccgaagggcatcgtctggctaatgttatgatggggccttatcggcaagatcttctcgccaagtgtgaccgagtggaccagctgacagcccagctggctgacctggctgccagaggggaaggggagagtcctcaggcacgagcacttgcatctcagctccaagactccttaaaggatctaaaagctcggatgcaggaggccatgactcaggaagtgtcagatgttttcagcgataccacaactcccatcaagctgttggcagtggcagccacggcgcctcctgatgcgcctaacagggaagaggtatttgatgagagggcagctaactttgaaaaccattcaggaaagcttggtgctacggccgagaaggcggctgcggttggtactgctaataaatcaacagtggaaggcattcaggcctcagtgaagacggcccgagaactcacaccccaggtggtctcggctgctcgtatcttacttaggaaccctggaaatcaagctgcttatgaacattttgagaccatgaagaaccagtggatcgataatgttgaaaaaatgacagggctggtggacgaagccattgataccaaatctctgttggatgcttcagaagaagcaattaaaaaagacctggacaagtgcaaggtagctatggccaacattcagcctcagatgctggttgctggggcaaccagtattgctcgtcgggccaaccggatcctgctggtggctaagagggaggtggagaattccgaggatcccaagttccgtgaggctgtgaaagctgcctctgatgaattgagcaaaaccatctccccaatggtgatggatgcaaaagctgtggctggaaacatttccgaccctggactgcaaaagagcttcctggactcaggatatcggatcctgggagctgtggccaaggtcagagaagccttccaacctcaggagcctgacttcccgccgcctccaccagaccttgaacaactccgactaacagatgagcttgctcctcccaaaccacctctgcctgaaggtgaggtccctccacctaggcctccaccaccagaggaaaaggatgaagagttccctgagcagaaggccggggaggtgattaaccagccaatgatgatggctgccagacagctccatgatgaagctcgcaaatggtccagcaagccgggcatcccagccgctgaggtgggtataggtgttgtagctgaggcagatgcggccgatgctgctggcttccctgtcccccctgacatggaagacgattacgaacctgagctgctgttaatgccatccaatcagccggtcaaccagcccattctggccgcggctcagtccttgcatcgggaagctaccaagtggtctagtaagggcaatgacatcattgcagcagccaagcgcatggctctgctgatggctgagatgtctcggctggtaagagggggcagtggtaccaagcgggcactcattcagtgtgccaaggacatcgccaaggcctcagatgaggtgactcggttggccaaggaggttgccaagcagtgcacagataaacggattagaaccaacctcttacaggtatgtgagcgaatcccaaccataagcacccagctcaaaatcctgtccacagtgaaggccaccatgctgggccggaccaacatcagtgatgaggagtctgagcaggccacagagatgctggttcacaatgcccagaacctcatgcagtctgtgaaggagactgtgcgggaagctgaagctgcttcaatcaaaattcgaacagatgctggatttacactgcgctgggttagaaagactccctggtaccagtaggcacctggctgagcctggctggcacagaaacctctactaaaaagaaggaaaatgatctgagtcccaggagctgcccagagttgctgggagctgaaaaatcacatcctggcctggcacatcagaaaggaatgggggcctcttcaaattagaagacatttatactcttttttcatggacactttgaaatgtgtttctgtataaagcctgtattctcaaacacagttacacttgtgcaccctctatcccaataggcagactgggtttctagcccatggacttcacataagctcagaatccaagtgaacactagccagacactctgctctgcccttgttccctaggggacacttccctctgtttctctttccttggctcccattcactcttccagaatcccaagacccagggcccaggcaaatcagttactaagaagaaaattgctgtgcctcccaaaattgttttgagctttccatgttgctgccaaccataccttccttccctgggctgtgctacctgggtccttttcagaagtgagctttgctgctacaggggaaggtggcctctgtggagccccagcatatgggggcctggattcatttcctgcccttcctcagtttaatccttctagtttcccacaatataaaactgtacttcactgtcaggaagaaatcacagaatcatatgattctgcttttaccatgcccctgagcaatgtctgtgctagggaaactccccgtcccatatcctgcctcagcccgccaaggtagccatcccatgaacacactgtgtcctggtgctctctgccactggaagggcagagtagccagggtgtggccctgccatcttcccagcagggccactcccggcactccatgcttagtcactgcctgcagaggtctgtgctgaggccttatcattcattcttagctcttaattgttcattttgagctgaaatgctgcattttaattttaaccaaaacatgtctcctatatcctggtttttgtagccttcctccacatcctttctaaacaagattttaaagacatgtaggtgtttgttcatctgtaactctaaaagatcctttttaaattcagtcctaagaaagaggagtgcttgtcccctaagagtgtttaatggcaaggcagccctgtctgaaggacacttcctgcctaagggagagtggtatttgcagactagaattctagtgctgctgaagatgaatcaatgggaaatactactcctgtaattcctacctccctgcaaccaactacaaccaagctctctgcatctactcccaagtatggggttcaagagagtaatgggtttcatatttcttatcaccacagtaagttcctactaggcaaaatgagagggcagtgtttcctttttggtacttattactgctaagtatttcccagcacatgaaaccttattttttccaaagccagaaccagatgagtaaaggagtaagaaccttgcctgaacatccttccttcccacccatcgctgtgtgttagttcccaacatcgaatgtgtacaacttaagttggtcctttacactcaggctttcactatttcctttaaaatgaggatgattattttcaaggccctcagcatatttgtatagttgcttgcctgatataaatgcaatattaatgcctttaaagtatgaatctatgccaaagatcacttgttgttttactaaagaaagattacttagaggaaataagaaaaatcatgtttgctctcccggttcttccagtggtttgagacactggtttacactttatgccggatgtgcttttctccaatatcagtgctcgagacacagtgaagcaaattaaaaaaaa

SEQ ID NO: 310 - DNA, 60 bp, Homo sapiens
ctgtgtgttagttcccaacatcgaatgtgtacaacttaagttggtcctttacactcaggc

SEQ ID NO: 311 - DNA, 2953 bp, Homo sapiens
ccctgagccttcccgtccgcctcgccacgcgcccggacggcctggggttgctgcccgtcagtctcgaaaggtgtttttggggaaaaaaatcacaatctggacgtgagaaaggacatgaggagactaaagacctgggattttgtcaatcagaatgaaaccaatgttgaaagacttttcaaatctattgttggtggtactctgtgactatgttcttggagaagctgaatatcttctcttgagagagccaggccatgtagcactaagcaacgacacagtgtatgtggatttccagtattttgatggtgctaatgggacactgaggaatgtatctgtcctgctgttggaggccaacaccaatcagactgtaactaccaagtacctcctgaccaaccagtcccagggaacactaaagtttgagtgcttctatttcaaggaggctggtgactactggttcacaatgactccagaagcaacagacaacagcactccattcccctggtgggagaaaagtgcctttctgaaggtggaatggcctgtctttcacgttgacttgaataggagtgccaaggcagcagaaggcaccttccaagtgggcctatttaccagtcaaccactgtgcccgtttcctgtggacaagcccaacattgtagtggatgtcatcttcaccaacagtcttcctgaggcaagaagaaattcaagacagccgctggaaataagaaccagcaaaaggacagaacttgctcaaggtcagtgggttgagtttggctgtgcacccttggggccagaagcctatgtcaccgtggtgctgaagctgcttgggcgagactcagtcattacctccacaggacccattgacctggcccagaaatttggatacaaactggtgatggtgccagaactcacatgtgagtccggggtagaggtgacagtgctgcctccaccatgcaccttcgtccaaggagtggtcactgtcttcaaggaggcccccagataccctgggaagaggaccattcacttggctgaaaacagcctgcccctgggagagaggaggacaatttttaactgtactttgtttgacatggggaagaataagtactgctttgactttggcatttcaagcagaagccatttttctgcaaaggaggagtgcatgctaattcagagaaatacagaaacttggggactgtggcagccatggagccagtgtagtgccacatgtggggatggtgtcagagagcgtcgccgagtgtgtctcacttccttcccctccagtcctgtctgccctggaatgtccttggaggcctccctgtgttccctggaggagtgtgctgctttccagccatccagcccatctcctcttcagccccagggtccagtgaagtccaacaacatcgtgactgtcactggtatatccttgtgcttgttcatcatcattgccactgtgctcatcacgctgtggaggaggttcggccggccagccaagtgcagcacacctgctcgacacaactccatccactcccccagcttccggaagaactcggacgaggagaatatctgcgagctgagcgagcagcgcgggagcttctcggatgggggagacgggcccacggggagtccaggggacacaggcatccctctgacctacaggcggagcgggccggtacctcccgaggatgatgcctctggcagcgagagcttccagtccaacgcccagaagataatcccacctctgttcagctaccgccttgcccagcagcagttaaaggagatgaaaaagaaaggtctgacggaaactaccaaagtgtatcacgtgtctcagagtcccctgacagacactgccattgatgcggcccccagcgctcccttagatttggaaagcccggaagaagctgcagcaaacaagttccggatcaaatccccatttccggagcagcccgcggtcagtgccggggaaaggcctccctccaggctggatctaaatgtgactcaggccagttgtgccataagccccagccagactctgatccgcaagtcacaggcaaggcacgtgggcagcagagggggcccgtccgaaaggagccatgccaggaacgcccatttcaggaggacagcgagtttccatgaagccaggcaggcccggccgttccgagagaggagcatgtccactctgactccacggcaggcccctgcctacagctctaggacgcggacctgcgagcaggcagaggacagatttaggcctcagagtcgaggtgcccacctgtttcctgaaaaactggagcatttccaagaggcaagtggaacccgtggtccattaaaccctctccctaaatcctacactttggggcagcccttgaggaaaccagaccttggggatcaccaggcaggattagtggccggaattgagagaacagagccccacagagctcgtcggggaccgtcccccagtcacaagagtgtctcaaggaagcagtcttctcccatatcccccaaagataactaccagagggtcagttctctgagcccttctcagtgtagaaaagacaagtgtcaaagcttccccactcaccctgagtttgccttctatgacaatacgtcgtttggcctcactgaggctgagcagaggatgctggacctcccaggatattttgggtcaaatgaagaggatgaaaccacaagtacacttagcgtggagaagctggtgatctagactgagaatcagcctgagctttacacagctggggtctgctactcgcgttttgtagacttttgtgtaactatttgtaccgtaggacagaatgtgaggaggaagtaacacacagaggaggatgtgtgtgtatgcatgtgtttgaattcacaaggaagaaattatttatcttgagctttttcctttgttattcaatttctattgatttattagtaataacaatggataataaaatgtaaatgagtg

SEQ ID NO: 312 - DNA, 60 bp, Homo sapiens
ttttgtgtaactatttgtaccgtaggacagaatgtgaggaggaagtaacacacagaggag

SEQ ID NO: 313 - DNA, 1823 bp, Homo sapiens
ttgcggccgccaacgccgcccggactggagccctgacattgctgcgctcggggggctccaggcagcccgtatcggggcctttatttctcgtcggcggcgccctgcaccgcgcctcgcaaagccaaacaccagagcaccctagaaggtttaactaaaagaatgctcatgtttgacccagttcctgtcaagcaagaggccatggaccctgtctcagtgtcatacccatctaattacatggaatccatgaagcctaacaagtatggggtcatctactccacaccattgcctgagaagttctttcagaccccagaaggtctgtcgcacggaatacagatggagccagtggacctcacggtgaacaagcggagttcacccccttcggctgggaattcgccctcctctctgaagttcccgtcctcacaccggagagcctcgcctgggttgagcatgccttcttccagcccaccgataaaaaaatactcacccccttctccaggcgtgcagcccttcggcgtgccgctgtccatgccaccagtgatggcagctgccctctcgcggcatggaatacggagcccggggatcctgcccgtcatccagccggtggtggtgcagcccgtcccctttatgtacacaagtcacctccagcagcctctcatggtctccttatcggaggagatggaaaattccagtagtagcatgcaagtacctgtaattgaatcatatgagaagcctatatcacagaaaaaaattaaaatagaacctgggatcgaaccacagaggacagattattatcctgaagaaatgtcaccccccttaatgaactcagtgtcccccccgcaagcattgttgcaagagaatcacccttcggtcatcgtgcagcctgggaagagacctttacctgtggaatccccggatactcaaaggaagcggaggatacacagatgtgattatgatggatgcaacaaagtgtacactaaaagctcccacttgaaagcacacagaagaacacacacaggagaaaaaccctacaaatgtacatgggaagggtgcacatggaagtttgctcggtctgatgaactaacaagacatttccgaaaacatactggaatcaaacctttccagtgcccggactgtgaccgcagcttctcccgttctgaccatcttgccctccataggaaacgccacatgctagtctgattgcctctgtgtcctgcctcagcgtgactccccactcacttggctctctctctgtcctgcctcccattatctaacacattttttacatgtacattttaatttgattcagctggtctgaatctctgaatttatatcatccaaaacttccatatggtcagtagtagatgttctctaatcctccctctccttaccacgggtcagacctaaagaatgtgaacactttttttttttttttctggggatgctaagcaaacccttcttacagatacgtttaatgtaataagaacaagggaacatgtaaactaacataaccaattgtcagttctccatgtattcctcaaaagaatgtcagagtaaatgtattagaaatacagtatccagactgctagtccttgccagagacattcttacctctgccctgtgatcatattttatgcttgacagcgaaaacaagtgtggccccttgcaccggttagctagaagtacagccagatttcaagctagtgcaatcacctcttccgccaattttttacaaatcttgtcaacctggatcttacacttcatctgaattcagttctttgccctccttcgcgcctgcagctcatatggaagtctttgccaccaat

SEQ ID NO: 314 - DNA, 60 bp, Homo sapiens
ctgaatttatatcatccaaaacttccatatggtcagtagtagatgttctctaatcctccc

SEQ ID NO: 315 - DNA, 1176 bp, Homo sapiens
gccgcggaacagttgcgtctccatctggctaccaacccacccaagctttcttctccaccaccaccaccttccttccttccccctcctccccctcctttccgtcttccctctccacccccgcccccaatctcctcctttttttctcactacgagcggttgctgatgctgaagccgagcgtcacttcggctcccacggcagacatggcgacattgacagtggtccagccgctcaccctggacagagatgttgcaagagcaattgaattactggaaaaactacaggaatctggagaagtaccagtgcacaagctacaatccctcaaaaaagtgcttcagagtgagttttgtacagctattcgagaggtgtatcaatatatgcatgaaacgataactgttaatggctgtcccgaattccgtgcgagggcaacagcaaaggcaacagttgcagcttttgcagctagtgaaggccactcccaccctcgagtagttgaactgccaaagactgatgaaggccttggttttaatgtgatgggaggaaaggagcaaaattcccccatttatatctctcgcataattcctggaggggtggctgaaagacacggaggcctcaaaagaggagaccagctgctatcagtgaacggagtgagtgtggaaggagaacaccatgagaaagctgtggaactactcaaggctgctaaagacagcgtcaagctggtggtgcgatacaccccaaaagttctggaagaaatggaggctcgctttgaaaagctacgaacagccaggcgtcggcagcagcagcaattgctaattcagcagcagcaacagcagcagcagcaacaaacacaacaaaaccacatgtcataggcccttgagggaaagctacttgatcaaacatccgatagtcacaaatttgaaaccgtgcttcagaatcccagcacatagtaaaagacaacactgataattatacctgtcaagaagctgtgaacacatggtgtataaattctttaccaaggcaactcaacaccttctttctctgggcttgaaccgccactgctcacgtgggctttacatacattgaccttccattcactgcagtgggaattctcagtgtgcagagggagaggttttctagtctgcaaactgaaacagtgtaagaagaataaagtctatgacttt

SEQ ID NO: 316 - DNA, 60 bp, Homo sapiens
tgagggaaagctacttgatcaaacatccgatagtcacaaatttgaaaccgtgcttcagaa

SEQ ID NO: 317 - DNA, 2557 bp, Homo sapiens
tccagcccccaccatgccgtggcccctgctgctgctgctggccgtgagtggggcccagacaacccggccatgcttccccgggtgccaatgcgaggtggagaccttcggccttttcgacagcttcagcctgactcgggtggattgtagcggcctgggcccccacatcatgccggtgcccatccctctggacacagcccacttggacctgtcctccaaccggctggagatggtgaatgagtcggtgttggcggggccgggctacacgacgttggctggcctggatctcagccacaacctgctcaccagcatctcacccactgccttctcccgccttcgctacctggagtcgcttgacctcagccacaatggcctgrcagccctgccagccgagagcttcaccagctcacccctgagcgacgtgaaccttagccacaaccagctccgggaggtctcagtgtctgccttcacgacgcacagtcagggccgggcactacacgtggacctctcccacaacctcattcaccgcctcgtgccccaccccacgagggccggcctgcctgcgcccaccattcagagcctgaacctggcctggaaccggctccatgccgtgcccaacctccgagacttgcccctgcgctacctgagcctggatgggaaccctctagctgtcattggtccgggtgccttcgcggggctgggaggccttacacacctgtctctggccagcctgcagaggctccctgagctggcgcccagtggcttccgtgagctaccgggcctgcaggtcctggacctgtcgggcaaccccaagcttaactgggcaggagctgaggtgttttcaggcctgagctccctgcaggagctggacctttcgggcaccaacctggtgcccctgcctgaggcgctgctcctccacctcccggcactgcagagcgtcagcgtgggccaggatgtgcggtgccggcgcctggtgcgggagggcacctacccccggaggcctggctccagccccaaggtggccctgcactgcgtagacacccgggaatctgctgccaggggccccaccatcttgtgacaaatggtgtggcccagggccacataacagactgctgtcctgggctgcctcaggtcccgagtaacttatgttcaatgtgccaacaccagtggggagcccgcaggcctatgtggcagcgtcaccacaggagttgtgggcctaggagaggctttggacctgggagccacacctaggagcaaagtctcacccctttgtctacgttgcttccccaaaccatgagcagagggacttcgatgccaaaccagactcgggtcccctcctgcttcccttccccacttatcccccaagtgccttccctcatgcctgggccggctgacccgcaatgggcagagggtgggtggacccctgctgcagggcagagttcaggtccactgggctgagtgtcccttgggcccatggcccagtcactcaggggcgagtttcttttctaacatagccctttctttgccatgaggccatgaggcccgcttcatccttttctatttccctagaaccttaatggtagaaggaattgcaaagaatcaagtccacccttctcatgtgacagatggggaaactgaggccttgagaaggaaaaaggctaatctaagttcctgcgggcagtggcatgactggagcacagcctcctgcctcccagcccggacccaatgcactttcttgtctcctctaataagccccaccctccccgcctgggctccccttgctgcccttgcctgttccccattagcacaggagtagcagcagcaggacaggcaagagcctcacaagtgggactctgggcctctgaccagctgtgcggcatgggctaagtcactctgcccttcggagcctctggaagcttagggcacattggttccagcctagccagtttctcaccctgggttggggtcccccagcatccagactggaaacctacccattttcccctgagcatcctctagatgctgccccaaggagttgctgcagttctggagcctcatctggctgggatctccaaggggcctcctggattcagtccccactggccctgagcacgacagcccttcttaccctcccaggaatgccgtgaaaggagacaaggtctgcccgacccatgtctatgctctaccccagggtagcatctcagcttccgaaccctgggctgtttccttagtcttcattttataaaagttgttgcctttttaacggagtgtcactttcaaccggcctcccctacccctgctggccggggatggagacatgtcatttgtaaaagcagaaaaaggttgcatttgttcacttttgtaatattgtcctgggcctgtgttggggtgttgggggaagctgggcatcagtggccacatgggcatcaggggctggccccacagagaccccacagggcagtgagctctgtcttcccccacctgcctagcccatcatctatctaaccggtccttgatttaataaacactataaaaagttaaaaaaaaaaaaaaaaaaaaa

SEQ ID NO: 318 - DNA, 60 bp, Homo sapiens
gggatggagacatgtcatttgtaaaagcagaaaaaggttgcatttgttcacttttgtaat

SEQ ID NO: 319 - DNA, 2376 bp, Homo sapiens
cggatgagggtcagggctgcgcggacccctatcccgcctgcgtcctcccggcaagcccagcgggagcgcccgctcggctgggtccccgcctccagcgcgccggggccgcccagaccctgggctcagcctcgcgccccggtgcccacctgaggaggcggcggtcccggcctcgcgtcccggatgggacggcgcgggagcaatgccagtggccccgagcgccccgggccacgcgcggggccggccagccgctctcgcgccctccccgccccctccgcgccttgcctcgccgcccgcgcgccccacccaccggccgctcctcccctctccccaccctcctcctccgccccctcccctcccccgccgcctcgcagatagctcggccgcgcgtctcagccgccggggccccgagcgcaggcggcgaggccaccacacctgcagagcgctcgggctgcctaggcggcacctcgcctcccgccgcgcaaaccccttctccccacgcgccgagtctcccatgacgcccgagccccccggccggcgacaatgaccacttccctgcaagatgggcagagcgccgcgagcagggcggctgcccgggattcgccgctggccgcccaggtgtgtggcgctgcccaggggaggggcgacgcccacgacctggcgccggccccctggctgcacgcgcgagcgctcctgccccttccggacgggacccgcggctgtgctgcagacaggagaaaaaagaaagatcttgatgttccggaaatgccatctattccaaacccttttcctgagctatgctgttctccaattacatctgtgttgtcagcagacctatttcccaaagcaaattcaaggaaaaaacaggtgattaaagtatacagtgaagatgaaaccagcagggctttagatgtacccagtgacataacggctcgagatgtttgtcagctgttgatcctgaagaatcattacattgatgaccacagctggaccctttttgagcacctgcctcacataggtgtagaaagaacaatagaagaccacgaactggtgattgaagtgctatccaactgggggatagaagaagaaaacaaactatactttagaaaaaattatgccaaatatgagttctttaaaaacccaatgtatttttttccagagcatatggtatcttttgcaactgaaaccaatggtgaaatatcccccacacagattttgcagatgtttctgagttcaagcacatatcctgaaattcatggtttcttacatgcgaaagaacagggaaagaagtcttggaaaaaaatttacttttttctaagaagatctggtttatatttttctactaaaggaacatcaaaggaaccgcggcatttgcagtttttcagcgaatttggcaatagtgatatttatgtgtcactggcaggcaaaaaaaaacatggagcaccgactaactatggattctgctttaagcctaacaaagcgggagggccccgagacctgaaaatgctctgtgcagaagaagagcagagtaggacgtgctgggtgaccgcgattagattgcttaagtatggcatgcagctgtaccagaattatatgcatccatatcaaggtagaagtggctgcagttcacagagcatatcacctatgagaagtatatcagagaattccctggtagcaatggacttctcaggccagaaaagcagagttatagaaaatcccactgaagccctttcagttgcggttgaagaaggactcgcttggaggaaaaaaggatgtttacgcctgggcactcacggtagccccactgcctcttcacagagctctgccacaaacatggctatccaccggtcccagccatggtttcaccacaaaatttctagagatgaggctcagcgattgattattcagcaaggacttgtggatggagttttcttggtacgggatagtcagagtaaccccaaaactttcgtactgtcaatgagtcatggacaaaaaataaagcactttcaaattataccagtagaagatgacggtgaaatgttccacacactggatgatggccacacaagatttacagatctaatacagctggtggagttctatcaactcaataagggcgttcttccttgcaagttgaaacattattgtgctaggattgctctctagacaagccagaagtgacttattaaactattgaaggaaaaggactcaagaaaaataataaaagaccataaataagggcgaaaacattatcatgtgaaaagaatgtatttcacctgcaagttacaaaaaaatagtttgtgcattgcaaataagcaaagacttggattgactttacattcatcatttaaaattcattagttaaaattaaaccttagg

SEQ ID NO: 320 - DNA, 60 bp, Homo sapiens
ggacaaaaaataaagcactttcaaattataccagtagaagatgacggtgaaatgttccac

SEQ ID NO: 321 - DNA, 5592 bp, Homo sapiens
gcgcccgcccgccggggtctcggcgatcgctgctcctcctcctccttctcctcctcttttttctcctccgcctcctccccccgccgcctcgccaccgccgcggctagggctggaggcgccgctgtcattcctgtgccggaggaaccggcgctgccggtgcctgggggtcggggcgcgggcgaagccgggccgcggaggacacaacaggtagagccgggggtgcccggccgcgcgccccccgcgcatcatgcagctctttgtcacctctctcgcccccaggccaaaatcctgagcatgatggaagacaataagcagctcgcgctccgcatcgatggggcggtccagtcggccagccaggaggtgaccaacctgcgagccgaactcacggccaccaaccggagactggcggaactgagcggcggcggcggccccggcccgggcccgggagccgcggccagcgcctcggcggcgggggactcggcggcgacgaacatggagaacccccagcttggagcgcaagtgctcctgcgggaagaagtgtcgcggctccaggaggaagttcaccttctccggcagatgaaggagatgttggcgaaggacctggaggagtcgcagggcggcaagtcctctgaggtcctctcggccaccgagctcagggtccagctggcccagaaggagcaggagctagccagagccaaagaagccttgcaggccatgaaagctgatcggaagcgcttaaagggcgagaagacagacctggtgagccagatgcagcagctgtatgccacactggagagccgcgaggagcagctccgagacttcatccgcaactatgagcagcaccgcaaggagagcgaggatgcggtcaaagcgctggccaaggagaaggacctgctggagcgtgagaagtgggagctgcggcgccaagccaaggaggccacagaccacgccacggcactgcgctcccagctggacctcaaggacaaccggatgaaggagctggaggccgagctggccatggccaaacagtccttagctacgctgaccaaggacgtccccaagcggcattccctcgccatgccgggcgagacggtgctcaatggcaaccaggagtgggtggtgcaggcggacctcccgctgaccgcagccatccggcagagtcaacagactctctaccactcacacccccctcaccctgcggaccggcaagcggtcagggtgagcccctgccactcccggcagccctctgtcatctccgacgcatctgccgccgaaggcgaccggtcgtccacaccgagcgacatcaactcccctcgacaccggacacactccctctgcaacgtaaggccagcagcagcggggcctgggcccctgggccctgcccagaaactgcaggggcgggggtggcggggtgaagccatactcgctgtttcctctcgtccacccagggagcactctggcgaatgcatttcctgttctgttctttccttttgcaagaagcgatggatgtggggagaaaaaggaatgaggcccgtttgctccttgtgtccgggagggtgaggagaatccagaggaagcgggcctgggtcggccgcaggcacagcctggaactctgccccagtgggccctgtctgggaccgtgggcttctcctcccacacattaccttccagagctcagggcctccccagcacctcctcatttccctttagagccagctctctatcctgacccaggagtcttggcatgaattgcctctggagaggcttgtgaatatggtctaagtttgtttcctttgtttatttcatcaaacactttttgattgcatactgggcaccagctcccaggaggcaaaggccctagctgcctagctcttgatgactagtggggcagacagatgggctctgcaacagtgtgggagtaaattgaaggtgggttgagcttctgaggacagttggaagccatgtcgaggctctaacatgaaatattggggtctgggtgtggggaccaccttgaatttttgttttatcacacagttggtaatgcagaggctcccctctgccatatcctgaagacagacatcatagggttagatcctcaaatgcacgagacggctttttccaaaactcagttaatgtcactttattaaccagcgaaatagataataaaaaagaaatgaggtgaacacattggacaaaaccattacttgccagtgacatgattctctacctggagaactcaagagaataacttgaaaagctattagaatgaataataagcatgtacataacagtgttgcttggaaatcagtgtgtaaaaatcaatcactttcctatagatgagtcgtaattatggaaccatttttttcaatccacaataatgaaaagtgcttataaaaatagctaagagtaaacttcagagaagctgcctcagtctgctcaggtgggcggcagagattgctggcccggggactttagatggcctcctcagagtaggaaggtcatttgcagcctggggccctgctcaggcctgggattctcttttttattgttttattttatttatttgtatgtgtgtgtgatggagtttcactcttgtcacccaggatggagtgcagtgacgcagtctcagctcactgcaaccaacaccttccaggctcaaacaattctcctgcctcagcctcccgagcagctggcattacagatgcctgccatcacacccggctaatttttgtatttttagtagagatgagatttcaccatgttggccaggctggtcttcaactcctgacctcaggcgatctgcccacctcagtctcccaaagtgctgggattatagacatgagccactgcacctggcgggattctctgttttatactggtgctttgaggaagcagtatgttcttctcttgtccccagaagagaatcctagtgacaaagtctatcttgactaacagaaccaaggcaaggaaggtgggccactggaggggtctctgacatccattccctgatcctgaaggaccactgtggagttatacctacagccagcagtgtccctgcaccattctcatcccagttgagaataccttccccccacggccatattttgtcttctcgtggtgggcccatggggactctggcagcagaaatgctgctggaaaaaccccattctgcagaaggagttctccaaaggcctcttgaattgcatttgacccagccctagtcttttgcccaccatagccttggcacattcctgctgccaggaaatgggtgctttgataagccagttgtctgcatacaggcgtttcagtgagcaggccccattctctttacccatagatttggcaaagatgttcctatccagagtggaactatcttagctgccttcagaatggattctgtttgcaaaccttgagactaaagactaaactaccattcattaattccctcacttcctcaaccctttttatccccccatctcaacaggtgtgcatgcaggtaagccaggaagagcccaaaaatagctacaggtaaccctttgccttgggcatctgacgtccaccagcaagaatagtgcagcctggactaatgactgcctcatcctctcacactctggccactaatttagagcaaaagtaggaactcagcatagagaggttggagaaggttgacggaccttggcattatgcttgcaattccagaaataaccaccaggagtctccctagtaatgactgttttgatccaaaggatctgtgggctccagacagggcagactgattctgggatgtagtgaaggcttttgtacacctgtaggctattaagggttccctccacacccacgtaaggcagggctggcaacacaatggaaatgtcctacctgcccatcctagggacctgtcgtctgaggctccctaggaaaaagggaaggagttcagacccctcctggggcagcccaaagctcaggaccaagtatgcagttaccctggagctcctgcctggaaggagcactgtgccaggaggaatctgacagcccccaattggagctgtagctctgcatccaattagctccacggtagtggactgtctgctgcctctcttgatatctgtgaatagggctaacgagtcctgcctgcccctgcgcaaactaagagattcattgtgtcggttgtgggggaagctagaggctacgtggtctcccaagtttgtttctgtcccaaaattctctattttgtgctttttctataaaagtacatttctttatgaaaagcaccaagtctaaccaagctctagctctaactcagaggacagactgggacaggaacttagacgccctggagtggctaatttgttggtcagaagatgctgggggttgagaggccagactgggcaggagaggaccccaggaactctagggaaactccaggccccatcaataagccatctgggggtatctgcttcaggagatggggggtgggctccccactgcagaggcagggtggcccctgagagatggcatccttccacggaaggccccacaccgcacgggccgcctctgctctcctgtgtcacctgtctctgctgtttcatcttcctcttctcctctggctacagggcgacagtcccggcccagttcagaagaacctgcacaaccctattgtacagtcactagaggatcttgaagaccaaaaacggaaaaagaagaaagagaagatgggattcggctccatctcccgcgtcttcgccagagggaagcagcggaagtccctcgaccccggcctctttgatggtaccgcccctgattattacatagaggaggacgcggactggtgatacgcgctcccctgcgcctgctgcccgcaggcgtgtctgtgcgtgtgggcgtgtgtgcaagcgagcgtgggtgcgcgtgtggccgtgcgtggggtgcgtgtgcacgtgtgcgctggcacacatgggtgctgggtgtggccgagcgcctctaacaagtgaaaacacgagtgtgaacctctctcccctgcgtcgccacctctgtaattgatgtacataccgcaaaccgtgtgtgaacctgtcaactctctgtcgtctttggagcgatacagttgtgttgttaatctggtttattatttttcttcagtgtttggtttttctttttctttttgtttggttcgtcggtttgtttttgtttttgtttttttccccctttctcctcccctcctcctttttatgaaacttgaaaacttgaaggactgctgtgtatttgtaaataacaaaactattgtgcactctgtgcttgtaaatgtccctcgtccaaaccgctactcctggagcccgtctggcagaggatgtggtctgtttttgatgtcccccctcccgcccccctggtgtgaacgtgtgggaccagaccctgtcctgggggtgcgcccaagtcactttaaccacaaaacgccatcgtcgtcagggtaagctctgctctctacaaagactcgcgagccgggccaaggggccttgtcttggctgggtttgtcagaggtcaaaccggctcttttaaacggcctaccagtttttaaattgcattgccgtttctttctttatg

SEQ ID NO: 322 - DNA, 60 bp, Homo sapiens
ctctgtaattgatgtacataccgcaaaccgtgtgtgaacctgtcaactctctgtcgtctt

SEQ ID NO: 323 - DNA, 2102 bp, Homo sapiens
ccgctgggcgtagctgcgactcggcggagtcccggcggcgcgtccttgttctaacccggcgcgccatgaccgtcgcgcggccgagcgtgcccgcggcgctgcccctcctcggggagctgccccggctgctgctgctggtgctgttgtgcctgccggccgtgtggggtgactgtggccttcccccagatgtacctaatgcccagccagctttggaaggccgtacaagttttcccgaggatactgtaataacgtacaaatgtgaagaaagctttgtgaaaattcctggcgagaaggactcagtgatctgccttaagggcagtcaatggtcagatattgaagagttctgcaatcgtagctgcgaggtgccaacaaggctaaattctgcatccctcaaacagccttatatcactcagaattattttccagtcggtactgttgtggaatatgagtgccgtccaggttacagaagagaaccttctctatcaccaaaactaacttgccttcagaatttaaaatggtccacagcagtcgaattttgtaaaaagaaatcatgccctaatccgggagaaatacgaaatggtcagattgatgtaccaggtggcatattatttggtgcaaccatctccttctcatgtaacacagggtacaaattatttggctcgacttctagtttttgtcttatttcaggcagctctgtccagtggagtgacccgttgccagagtgcagagaaatttattgtccagcaccaccacaaattgacaatggaataattcaaggggaacgtgaccattatggatatagacagtctgtaacgtatgcatgtaataaaggattcaccatgattggagagcactctatttattgtactgtgaataatgatgaaggagagtggagtggcccaccacctgaatgcagaggaaaatctctaacttccaaggtcccaccaacagttcagaaacctaccacagtaaatgttccaactacagaagtctcaccaacttctcagaaaaccaccacaaaaaccaccacaccaaatgctcaagcaacacggagtacacctgtttccaggacaaccaagcattttcatgaaacaaccccaaataaaggaagtggaaccacttcaggtactacccgtcttctatctgggcacacgtgtttcacgttgacaggtttgcttgggacgctagtaaccatgggcttgctgacttagccaaagaagagttaagaagaaaatacacacaagtatacagactgttcctagtttcttagacttatctgcatattggataaaataaatgcaattgtgctcttcatttaggatgctttcattgtctttaagatgtgttaggaatgtcaacagagcaaggagaaaaaaggcagtcctggaatcacattcttagcacacctacacctcttgaaaatagaacaacttgcagaattgagagtgattcctttcctaaaagtgtaagaaagcatagagatttgttcgtatttagaatgggatcacgaggaaaagagaaggaaagtgatttttttccacaagatctgtaatgttatttccacttataaaggaaataaaaaatgaaaaacattatttggatatcaaaagcaaataaaaacccaattcagtctcttctaagcaaaattgctaaagagagatgaaccacattataaagtaatctttggctgtaaggcattttcatctttccttcgggttggcaaaatattttaaaggtaaaacatgctggtgaaccaggggtgttgatggtgataagggaggaatatagaatgaaagactgaatcttcctttgttgcacaaatagagtttggaaaaagcctgtgaaaggtgtcttctttgacttaatgtctttaaaagtatccagagatactacaatattaacataagaaaagattatatattatttctgaatcgagatgtccatagtcaaatttgtaaatcttattcttttgtaatatttatttatatttatttatgacagtgaacattctgattttacatgtaaaacaagaaaagttgaagaagatatgtgaagaaaaatgtatttttcctaaatagaaataaatgatcccattttttggt

SEQ ID NO: 324 - DNA, 60 bp, Homo sapiens
aaagcctgtgaaaggtgtcttctttgacttaatgtctttaaaagtatccagagatactac

SEQ ID NO: 325 - DNA, 3552 bp, Homo sapiens
ctgccatgctgactcatgtgcccgcagctagcaggagctggcagcatgggctccccaggggctacgacaggctgggggcttctggattataagacggagaagtatgtgatgaccaggaactggcgggtgggcgccctgcagaggctgctgcagtttgggatcgtggtctatgtggtagggtgggcgctcctcgccaaaaaaggctaccaggagcgggacctggaaccccagttttccatcatcaccaaactcaaaggggtttccgtcactcagatcaaggagcttggaaaccggctgtgggatgtggccgacttcgtgaagccacctcagggagagaacgtgttcttcttggtgaccaacttccttgtgacgccagcccaagttcagggcagatgcccagagcacccgtccgtcccactggctaactgctgggtcgacgaggactgccccgaaggggagggaggcacacacagccacggtgtaaaaacaggccagtgtgtggtgttcaatgggacccacaggacctgtgagatctggagttggtgccccgtggagagtggcgttgtgccctcgaggcccctgctggcccaggcccagaacttcacactgttcatcaaaaacacagtcaccttcagcaagttcaacttctctaagtccaatgccttggagacctgggaccccacctattttaagcactgccgctatgaaccacaattcagcccctactgtcccgtgttccgcattggggacctcgtggccaaggctggagggaccttcgaggacctggcgttgctgggtggctctgtaggcatcagagttcactgggattgtgacctggacaccggggactctggctgctggcctcactactccttccagctgcaggagaagagctacaacttcaggacagccactcactggtgggagcaaccgggtgtggaggcccgcaccctgctcaagctctatggaatccgcttcgacatcctcgtcaccgggcaggcagggaagttcgggctcatccccacggccgtcacactgggcaccggggcagcttggctgggcgtggtcacctttttctgtgacctgctactgctgtatgtggatagagaagcccatttctactggaggacaaagtatgaggaggccaaggccccgaaagcaaccgccaactctgtgtggagggagctggcccttgcatcccaagcccgactggccgagtgcctcagacggagctcagcacctgcacccacggccactgctgctgggagtcagacacagacaccaggatggccctgtccaagttctgacacccacttgccaacccattccgggagcctgtagccgttccctgctggttgagagttgggggctgggaagggcggggccctgcctggggatttcaaggatgaggccccagcatggaggattgggggtagaattccacccttgaaccccagcaaacagtccctcccctgactcccaccttggtagggtgctgcctcagggagccataaaagtcggctgtgttttgagacggcgacagaacctgacccgtggagactgggagagcccagcaggcacctgtattgcagggctccgactgcatgtggcaggggctcctgctgcgtctgggcctgaaggtctctctcccagtgctctgtccccagtgttcctagcagaggtatgcttaccagctgtcagcacaaaccctcctgctgcctgggtcctggccctcctcccccatctgcacccccatcataggtagagaccccaccctcccatcggtcctacatggggctgtgcagctggagccaaaaaggcaaggtagaaagaggagtgatgggggagggggattgtttcagcttctctggtgctgtgatgccccaggagagtcctaatctagggaatggggtggagtaggcagataatccacctccctatcccccaggcaagggcggagcatgtgtcttgggcccacacctgcttagtttatgaggaccggctgctttccagtggtagcccttttgccatggaggtctgggagagagagcagagggcggcagggctaagttggtgatcactgggttcttcaggaccttctatatccctcctcggtgaccccccagcccaaccccttggaatctttcctccaggcttcctgagagccctgggggtgggaggctgtgggaggctgtacatctgaaattcacttcagtccaagtcatacctaggaagctgtctgggcagctgctcgagggaggccctggctctgatcccaggctggatggagtggctggaaggaatggttccaaacaacaccaccgagatctccctcaggctggccaggttttgcagctggaattctcctcttggtcccagggcggggcagggaattctaagtgtccaccccagggaggcaaggggctgctttccactgtgggtacctggtgatcagggcaagctgtggagggccaggggtggggctgagactgggctgacatctagaatcacctgccacctggagcctcagtaaaatgcctggggtccctgctgcctctcaatctccagagccatgtccatggggaggtgggctctgaaggtgaaggtgggagagcaggcccctgaggcctgggtatccaacgaagggcacgtgcacctgattctccttggggcccagaggaagctgatgtcatggctggacaaagtcacggagtaaagccagcaaagccaccctcttcctgtgtagtccttacaggcatgactggaaagttggggggcatctatggtagacatggcacagccatgaagagaccagtggggtggtgcagggtggacttggggaccctacccctgaagactgaggccctgcagctaccaggtgggctagaaggtaactggaacaggcctgggcacttgtgcacccatgtaggagcatgagggccacactcttttcacctcaaagcccttgaagagtgggcaaagacagcaagagagctgcagcctgggcccgagctcagaaacagctgtcgcctcagtctgcgcacaagcatgcaccccagggtagtgcctgcagggatgcatgtgtccccgtgggggtgcctgtgccaggcaggcctcaggtgcatgccatgctcagaaccctgctgccctttctaggcagcctccttggggcccaagctctgctccctggatctgccacctagcagacgtggggagcctgaccccatgcctgtcatggaaccctccttgcctggtgtgtgtggctcccctcttcactgggcacctggatccaggcccacctgtgtccctgactcagggtggtcccaggcctggcacctactctttagagagccccagcatctttgatgtggattggagacaattgcctggttccctggggcaggtgaagacttggtgccacaaagaatgccacagtggatacgccagcaggccacatggctggccaagcaattattattatggatcccttgggctgtgggccttcccatccaccccaccacaactgcccaggtagctggagctgatcataaa

SEQ ID NO: 326 - DNA, 60 bp, Homo sapiens
acctactctttagagagccccagcatctttgatgtggattggagacaattgcctggttcc

SEQ ID NO: 327 - DNA, 3064 bp, Homo sapiens
gagatggcggaaggtggaggctgccgtgagcgaccggatgcggagactcagaagtccgagcttggacccttaatgaggaccacactccaacgcggggcgcagtggtatcttattgacagccggtggttcaagcagtggaagaagtatgtgggctttgacagctgggacatgtacaatgtgggtgaacataacctatttcctggcccaatagacaactctgggctattttcagatcctgagagtcagaccttgaaagaacacttaattgatgaattggactatgtattggtccctaccgaggcgtggaataaactactaaactggtacggctgtgtagaaggccagcaacccatcgtcagaaaagttgtggagcatggcctgtttgtcaagcactgcaaagtcgaggtgtatttgctggaactgaagctctgtgagaacagtgaccccaccaatgtgctgagttgccatttcagcaaggcagacaccattgcaaccatcgagaaagagatgcggaagctattcaacatccctgcggagcgtgaaacacggctctggaacaaatacatgagcaacacctacgagcagttgagcaagctagacaacactgtccaggatgctgggctataccagggtcaggtgctagtaattgagcctcaaaatgaagatggcacatggcccaggcagaccttgcagtcaaaatcaagcactgcgcctagcagaaattttactacctctccaaaatcatcagcaagtccctattcctcagtgtctgcctctctcattgcaaatggtgatagcactagcacctgtgggatgcacagttccggtgtcagcaggggtggatctggcttttctgcttcgtataattgtcaggagccaccatcctctcatatacaacctgggctctgtggacttggaaacctgggaaacacctgcttcatgaactccgctttgcagtgtttgagcaacactgcaccactgactgactactttctcaaagatgagtatgaagccgaaatcaacagagacaaccctctggggatgaaaggggaaattgcagaagcctatgctgaactcattaagcagatgtggtctggaagggacgcccatgtggcaccctcgatgttcaaaactcaagtaggacgttttgctcctcaattttctggctaccagcaacaagattctcaggagctgctggcctttcttctagatggattgcatgaagatctgaaccgggtaaagaaaaagccctacttggagctgaaggatgccaatgggcggccagatgcggtggtggcaaaggaagcctgggagaatcacaggttgaggaatgattctgtgattgtggatactttccatggcctcttcaaatctactttggtttgcccagaatgtgctaaggtttctgtgacctttgacccattttgctatctaacgctgccactgcccttgaagaaagatcgagttatggaggttttcctggttcctgctgaccctcactgcagacctactcagtaccgtgtgactgtgccgctgatgggggctgtgtccgacctgtgcgaggctctctccaggctgtctggcattgctgcagaaaatatggtggtcgcagatgtgtataatcaccgattccacaaaattttccaaatggatgaaggtttaaaccacatcatgcctcgggatgacattttcgtgtacgaggtctgcagcacttccgtggatggctcggaatgtgtcacgcttccagtctacttcagggagaggaagtccaggccatcaagcacttcctccgcatcagcgctatatgggcagccactattgctttctgtccccaagcacaagttaacccttgagtctttgtaccaggctgtttgtgatcgtatcagccgctatgtgaaacagcctttacctgatgagtttggcagctcacccttggagccaggggcctgcaatggctccaggaacagctgtgaaggagaagatgaggaagaaatggagcatcaggaagaaggcaaagagcagctttcagaaacagaaggcagtggggaagatgagccaggaaatgaccccagtgagaccacccaaaagaagatcaaaggccagccctgcccaaaaaggctttttaccttcagtcttgtgaactcctatggaacagctgacataaattcacttgcagctgatggaaaactacttaaactcaactctcgatctacactggccatggattgggacagagaaactcggagactttactatgatgagcaagaatctgaggcctacgagaagcatgtgagcatgttgcagcctcagaagaagaagaagaccacagtggccctgagagactgcatcgagctcttcaccaccatggagacccttggggagcatgacccctggtactgtcccaactgtaagaagcatcaacaggccacaaaaaagtttgacctatggtccttgcccaagatcctggtggtccacctcaaacgtttctcctacaacagatactggagggataagctcgacacagtcgtagaattcccaatcagagggctgaacatgtccgagtttgtctgtaacctgtcagcaaggccttatgtgtacgacctcattgccgtgtccaatcattatggagccatgggggttggccactacactgcatatgcgaagaacaaactgaatggtaaatggtattactttgatgatagcaacgtgtccctggcctctgaggatcagatagtgactaaagcagcttatgtgctattttaccaacgtcgagatgatgaattttataagacaccttcacttagcagttctggttcctctgatggagggacacgaccaagcagctctcagcagggctttggggatgatgaggcttgcagcatggacaccaactaatgctgactccacgatcctgccaccctgtagcgccagtgtaatcccccaggagaacatctttgacactctgcagactgctagtgttctgtctaaaaaccagacaaggaaatacccttcttttatgagcagaaggaaacaaaaaaaaaaagaagaccgtttacctagaaag

SEQ ID NO: 328 - DNA, 60 bp, Homo sapiens
actgcatatgcgaagaacaaactgaatggtaaatggtattactttgatgatagcaacgtg

SEQ ID NO: 329 - DNA, 3265 bp, Homo sapiens
tggagagggacaggaggaaacgcagcgccagcagcatctcatctaccctccttgacacctccccgtggctccagcaagccctagaggtcagccttgcggaccaacaggaggactcccagctttcccttttcaagaggtaccccagacaccggccaccctcttccagcccctgcggccagtgcaaggaggcaccaatgctctgaggctgtcgcgtggtgcagcgtcgagcatcctcgccgagtccttctgctgcctgtcccgcctcaccccgctccatcacaccagctggccctctttgcttccttttcccagaatcgttaagccccgactcccactagcacctcgtaccaacctcgccccaccccatcctcctgccttcccgcgctccggtgtcccccgctgccatgagctcccccatcagcaagagccgctcgcttgccgccttcctgcagcagctgcgcagtccgaggcagcccccgagactggtgacatctacggcgtacacgtcccctcagccgcgagaggtgccagtctgcccgctgacagctggtggcgagactcagaacgcggccgccctgccgggccccaccagctggccactgctggcgagcctgctgcagattctctggaaagggggtctcaagaaacagcacgacaccctggtggagtaccacaagaagtatggcaagattttccgcatgaagttgggttcctttgagtcggtgcacctgggctcgccatgcctgctggaagcgctgtaccgcaccgagagcgtaccccagcggctggagatcaaaccgtggaaggcctatcgcgactaccgcaaagaaggctacgggctgctgatcctggaaggggaagactggcagcgggtccggagtgcctttcaaaagaaactaatgaaaccaggggaagtgatgaagctggacaacaaaatcaatgaggtcttggccgattttatgggcagaatagatgagctctgtgatgaaagaggccacgtcgaagacttgtacagcgaactgaacaaatggtcgtttgaaagtatctgcctcgtgttgtatgagaagagatttgggcttctccagaagaatgcaggggatgaagctgtgaacttcatcatggccatcaaaacaatgatgagcacgtttgggaggatgatggtcactccagtcgagctgcacaagagcctcaacaccaaggtctggcagggacacactctggcctgggacaccattttcaaatcagtcaaagcttgtatcgacaaccggttagagaagtattctcagcagcctagtgcagatttcctttgtgacatttatcaccagaatcggctttcaaagaaagaattgtatgctgctgtcacagagctccagctggctgcggtggaaacgacagcaaacagtctaatgtggattctctacaatttatcccgtaatccccaagtgcaacaaaagcttcttaaggaaattcaaagtgtattacctgagaatcagaggccacgggaggaagatttgaggaatatgccgtatttaaaagcctgtctgaaagaatctatgaggcttaccccgggtgtaccatttacaactcggactcttgacaaggcaacagttctgggtgaatatgctttacccaaaggaacagtgctcatgctaaatacccaggtgttgggatccagtgaagacaattttgaagattcaagtcagtttagacctgaacgttggcttcaggagaaggaaaaaattaatccttttgcgcatcttccatttggcgttggaaaaagaatgtgcattggtcgccgattagcagagcttcaactgcatttggctctttgttggattgtccgcaaatacgacatccaggccacagacaatgagcctgttgagatgctacactcaggcaccctggtgcccagccgggaactccccatcgcgttttgccagcgataatacgcctcagatggtggtatttgctaacatcatatccaactcagggaagcggactgagtgctgggatccaaggcattctacagggttcactgctggtttacacttcacctgtgtcagcaccatcttcaggtgcttagaatggcctgggagcctgttctgtcttgcatcttccatgacatgaaagggaggctggcacttgtcagtcaggtagaggttacaaaccgtttcaggccctgctaccacattcactgtttgaatctttaattcccaagaataagtttacatttcacaatgaatgacctacaacagctaaattttctggggctgggagtaatactgacaatccatttactgtagctctgcttaatgtactacttaggaaaatgtccctgcttaataatgtaagccaagctaaatgatggttaaagttatcaggcctcccatgaaattgcgttcttcctgcattgaaataaaaacattattgggaaactagagaacacctctatttttaaaaggactttaacgaagtcaaacaacttctaagactagtgattcactggggcattatttgttagaggaccttaaaattgtttattttttaaatgtgattcctttatggcattagggtaaagatgaagcaataatttttaaattgtgtatgtgcatatgaagcacagacatgcatgtgtgtgtgtgtctgtgtgtgtgtgtccgtgtatgtgtgtgtgggttctaatggtaatttgcctcagtcatttttttaatatttgcagtacttgatttaggatctgtggtgcagggcatgtttcaaagtttagtcacagcttaaaaacattcagtgtgactttaatattataaaatgatttcccatgccataatttttctgtctattaaatgggacaagtgtaaagcatgcaaaagttagagatctgttatataacatttgttttgtgatttgaactcctaggaaaaatatgatttcataaatgtaaaatgcacagaaatgcatgcaatacttataagacttaaaaattgtgtttacagatggtttatttgtgcatatttttactactgcttttcctaaatgcatactgtatataattctgtgtatttgataaatatttcttcctacattatatttttagaatatttcagaaatatacatttatgtctttatattgtaataaatatgtacatatctaggtatatgctttctctctgctgtgaaattatttttagaattataattcacgtcttgtcatatttcatctgtataccttcaaattctctgaaagtaaaaataaaagtttttaaatatt

SEQ ID NO: 330 - DNA, 60 bp, Homo sapiens
gatttcccatgccataatttttctgtctattaaatgggacaagtgtaaagcatgcaaaag

SEQ ID NO: 331 - DNA, 4231 bp, Homo sapiens
ctgaggcagccgccctcgcgctgtgcaatttctggtctttcgttgcttctggtccaggctaataaagtttttctttctttaattttttttcttctagttttaacgggagaaattaactccccggggccgccgggttgactgcgctgcctgggccggaggtcttctccggccagggagcgctgtgggaaggggctcgagcggccagggccaggcgaggccgggggggcggggggttaggggaccgcggggctactcttgggagcgcccctgtccggctggctgcgcgccggttttaaatagcatctttcggacttgtcttcgcggccccagtccccgacctcggcgctgcctgggctcctgcagcctctccctaagtcttctccaaacgaccacctcacggattccttatggatcgcagctccaagaggaggcaggtgaagcctttggcagcttctctgctggaagctcttgattatgatagttcagatgacagtgattttaaagttggagatgcctcagattctgaagggagtggtaatggaagtgaagatgcttcaaaggacagtggagaaggttcctgtagtgattctgaagaaaatattttagaagaagaactgaatgaagatattaaagtaaaagaagaacaacttaaaaattctgcagaggaagaagtactatcatcagaaaaacaattaattaaaatggaaaagaaggaagaagaagaaaatggagaaagacctagaaagaaaagggagaaagagaaggaaaaagaaaaggaaaaggagaaagagaaggaaagagagaaggaaaaagaaaaagcaacagtatctgagaatgtggctgcttctgctgctgccaccacaccagccacaagtcctcctgctgttaacacatccccttctgttcccactacgacaaccgctacagaggaacaagtcagcgagccaaaaaaatggaaccttcgacgaaaccgaccacttctggattttgtgtccatggaagagctgaatgacatggatgactatgacagtgaggatgacaatgattggcgacctactgtagtaaagagaaaagggagatctgcatctcagaaagagggaagtgatggagacaatgaggatgatgaagatgagggaagcgggagtgatgaagacgagaatgatgaaggcaatgatgaagatcatagtagccctgccagtgaagggggttgcaagaagaagaagagtaaagttcttagcagaaacagtgctgatgatgaggaactgaccaatgatagcctgaccctatctcaaagcaagagtaatgaggactcgctgattcttgagaagagtcaaaactggagctctcaaaaaatggaccatattctgatttgctgtgtttgtctgggagataatagtgaggacgctgatgaaataattcagtgtgacaattgtggcattacagtccatgaaggttgttatggagttgatggagagagtgactctattatgagttcagcttctgaaaactccactgaaccttggttttgtgatgcctgtaaatgtggtgtttctcctagctgtgaactgtgtcctaatcaggatggaattttcaaggagacagatgctggaagatgggttcatattgtttgtgccctgtatgttcctggagtagcctttggagatattgacaaattacgaccagtaacactaacggaaatgaactattccaaatatggtgccaaggagtgtagcttttgtgaagaccctcgctttgctagaactggggtttgcattagctgtgatgcagggatgtgcagagcctatttccatgtgacctgtgctcaaaaggaaggtctgctttcagaggcagcggcggaagaggatatagcagatccattctttgcttattgtaagcaacatgcagataggttagacagaaagtggaagagaaaaaactacttggctctacagtcctattgtaaaatgtctttgcaagagagagagaagcaactatcaccagaagcacaggcaaggatcaatgcccggcttcagcagtatcgtgccaaagcagaactagctcgatctaccagaccccaggcctgggttccaagggaaaaattgcccagaccactcaccagcagtgcttcagctattcgtaaacttatgcggaaagcagaactcatggggatcagtacagatatctttccagtggacaattcagatactagttctagtgtggatggaaggagaaaacataagcaaccagctctcactgcagattttgtgaattattattttgagagaaatatgcgcatgattcaaattcaggaaaatatggctgaacaaaagaatataaaagataaattagagaatgaacaagaaaagcttcatgtagaatataataagctatgtgaatctttagaagaactacaaaacctgaatggaaaacttcgaagtgaaggacaaggaatatgggctttactaggcagaatcacagggcagaagttgaatataccggcaattttgcgagcacccaaggagagaaaaccaagtaaaaaagaaggaggcacacaaaagacatctactcttcctgcagtactttatagttgtgggatttgtaagaagaaccatgatcagcatcttcttttattgtgtgatacctgtaaactacattaccatcttggatgtctggatcctcctcttacaaggatgccaagaaagaccaaaaacagttattggcagtgctcggaatgtgaccaggcagggagcagtgacatggaagcagatatggccatggaaaccctaccagatggaaccaaacgatcaaggaggcagattaaggaaccagtgaaatttgttccacaggatgtgccaccagaacccaagaagattccgataagaaacacgagaaccagaggacgaaaacgaagcttcgttcctgaggaagaaaaacatgaggaaagagttcctagagagagaagacaaagacagtctgtgttgcaaaagaagcccaaggctgaagatttaagaactgaatgtgcaacttgcaagggaactggagacaatgaaaatcttgtcagatacccttcatgagacccaactctgccacagctcatcctcggaggcaatcccggaaacctcttttataagtgtgattttaaaaatgtggattaaactctcgatagagtacataaagtaaaggagaacagctatattgtcctttctataagcttgtcactgcaaaaagttgccttttgcttgtcaggtttggatagaatataattgattggtttgttacttggactaacaaggcagtagatttgcctgtgtggaattttttttcctatttttcttctttttgctttttttgcacttatcagaaatatttgatgtgtgcattgttgaaaaatactggatacatgtcttgtcagaattgtcgtattaagtaatgtctttccctcttgcttctttggcaaatgttgatacacagtgtttggacttactgaagagttactgaagcctgtgggacttaataaatacaatatgctactccctgttgtgattgaacaatacaaataacaaacaagaaagacaatgcattccattagtctgctattctgtttccttcaacttcatacatagattcatatatgaagtactgcattgtaaaacaactatagactcatattaaatgttatttctatttataatattcagcaaaagtgaaagacttgtgaagcatatgacattctatttttgacttattagtcctagtgtgaaagcattaatattattagcatgaaatttttacttcagattttaagctcatgaataaagatatatctgtgttgatctctagatatttttagtaatacccaaatatattcagtccttattgttttaatataagctttctgtgttcagtataattttatttttctcaaccttaaatatgaacttaggaaataaggagggaagtacaaagattattgactatacaacctaccagctgaaagaaagatcttcatcaacatctgtatctttccagaggtatacagaattaaaatttgatcttcaagctttaatgatccagttttaagtcaacggcagaagtatgttgaatatttcatcactcaatcttgaactgatttagaagagactctttgctgaaattgaattgcacttatacatgtaaattgtcaacatgtaatttggaattttctgattaataaatgtggttttggacatct

SEQ ID NO: 332 - DNA, 60 bp, Homo sapiens
atatgaacttaggaaataaggagggaagtacaaagattattgactatacaacctaccagc

SEQ ID NO: 333 - DNA, 2390 bp, Homo sapiens
cggccgccccctccccccgctccgcccgctcagagcataatggcagcgtctgaggttgctggtgttgtggccaatgcccccagtcctccggaatcttctagtttatgtgcttccaaatcagacgaaggtctcccagatggtctaagcaccaaagactctgcacagaagcagaagaactcgcctctgttgagtgtaagtagccaaacaataaccaaggagaataacagaaatgtccatttggagcactcagagcagaatcctggttcatcagcaggtgacacctcagcagcgcaccaggtggtttttaggagaaaacttgatagccacagccctttgtctttctggcagtgggtctcagtctgatttgaaggatgtggccagcacagcaggagaggagggggacacaagccttcgggagagcctccatccagtcactcggtctcttaaggcagggtgccatactaagcagcttgcctccaggaattgctctgaagagaaatccccacaaacctccatcctaaaggaaggtaacagggacacaagcttggatttccgacctgtagtgtctccagcaaatggggttgaaggagtccgagtggatcaggatgatgatcaagatagctcttccctgaagctttctcagaacattgctgtacagactgactttaagacagctgattcagaggtaaacacagatcaagatattgaaaagaatttggataaaatgatgacagagagaaccctgttgaaagagcgttaccaggaggtcctggacaaacagaggcaagtggagaatcagctccaagtgcaattaaagcagcttcagcaaaggagagaagaggaaatgaagaatcaccaggagatattaaaggctattcaggatgtgacaataaagcgggaagaaacaaagaagaagatagagaaagagaagaaggagtttttgcagaaggagcaggatctgaaagctgaaattgagaagctttgtgagaagggcagaagagaggtgtgggaaatggaactggatagactcaagaatcaggatggcgaaataaataggaacattatggaagagactgaacgggcctggaaggcagagatcttatcactagagagccggaaagagttactggtactgaaactagaagaagcagaaaaagaggcagaattgcaccttacttacctcaagtcaactcccccaacactggagacagttcgttccaaacaggagtgggagacgagactgaatggagttcggataatgaaaaagaatgttcgtgaccaatttaatagtcatatccagttagtgaggaacggagccaagctgagcagccttcctcaaatccctactcccactttacctccacccccatcagagacagacttcatgcttcaggtgtttcaacccagtccctctctggctcctcggatgcccttctccattgggcaggtcacaatgcccatggttatgcccagtgcagatccccgctccttgtctttcccaatcctgaaccctgccctttcccagcccagccagccttcctcaccccttcctggctcccatggcagaaatagccctggcttgggttcccttgtcagcccccacggtccacacatgccccctgccgcctccatcccacctcccccaggcttgggcggtgttaaggcttctgctgaaactccccggccccaaccagtagacaaactggagaagatcctggagaagctgctgacccggttcccacagtgcaataaggcccagatgaccaacattcttcagcagatcaagacagcacgtaccaccatggcaggcctgaccatggaggaacttatccagttggttgctgcacgactggcagaacatgagcgggtggcagcaagtactcagccacttggtcgcatccgggccttgttccctgctccactggcccaaatcagtaccccaatgttcttgccttctgcccaagtttcatatcctggaaggtcttcacatgctccagccacctgtaagctatgtctaatgtgccagaaactcgtccagcccagtgagctgcatccaatggcgtgtacccatgtattgcacaaggagtgtatcaaattctgggcccagaccaacacaaatgacacttgtcccttttgtccaactcttaaatgacggacctgactggggaggaagaagaagagaaactgatgtgaacaggaagcgcgggttcaagatttctaaaactctatatttatacagtgacatatactcatgccatgtacatttttattatataggtaatgtgtgtatagaaagtctgtattccaatgttcgtaaatgaaactatgtatattatgcaaaaaaaaaaaaaaaaaaaaaaaaaaaaaaaaaaaaaaaaaaaaaaaaaaaa

SEQ ID NO: 334 - DNA, 60 bp, Homo sapiens
gtctgtattccaatgttcgtaaatgaaactatgtatattatgcagaaacagtctgttccc

SEQ ID NO: 335 - DNA, 60 bp, Homo sapiens
gagtggtcaattgagtagtacagtggaaactgttaaatgcataacctaattttcctggga

SEQ ID NO: 336 - DNA, 2184 bp, Homo sapiens
ccgccttcggcccgggcctcccgggatggccgtggcgcctctgcggggggcgctgctgctgtggcagctgctggcggcgggcggcgcggcactggagatcggccgcttcgacccggagcgcgggcgcggggctgcgccgtgccaggcggtggagatccccatgtgccgcggcatcggctacaacctgacccgcatgcccaacctgctgggccacacgtcgcagggcgaggcggctgccgagctagcggagttcgcgccgctggtgcagtacggctgccacagccacctgcgcttcttcctgtgctcgctctacgcgcccatgtgcaccgaccaggtctcgacgcccattcccgcctgccggcccatgtgcgagcaggcgcgcctgcgctgcgcgcccatcatggagcagttcaacttcggctggccggactcgctcgactgcgcccggctgcccacgcgcaacgacccgcacgcgctgtgcatggaggcgcccgagaacgccacggccggccccgcggagccccacaagggcctgggcatgctgcccgtggcgccgcggcccgcgcgccctcccggagacctgggcccgggcgcgggcggcagtggcacctgcgagaaccccgagaagttccagtacgtggagaagagccgctcgtgcgcaccgcgctgcgggcccggcgtcgaggtgttctggtcccggcgcgacaaggacttcgcgctggtctggatggccgtgtggtcggcgctgtgcttcttctccaccgccttcactgtgctcaccttcttgctggagccccaccgcttccagtaccccgagcgccccatcatcttcctctccatgtgctacaacgtctactcgctggccttcctgatccgtgcggtggccggagcgcagagcgtggcctgtgaccaggaggcgggcgcgctctacgtgatccaggagggcctggagaacacgggctgcacgctggtcttcctactgctctactacttcggcatggccagctcgctctggtgggtggtcctgacgctcacctggttcctggctgccgggaagaaatggggccacgaggccatcgaggcccacggcagctatttccacatggctgcctggggcctgcccgcgctcaagaccatcgtcatcctgaccctgcgcaaggtggcgggtgatgagctgactgggctttgctacgtggccagcacggatgcagcagcgctcacgggcttcgtgctggtgcccctctctggctacctggtgctgggcagtagtttcctcctgaccggcttcgtggccctcttccacatccgcaagatcatgaagacgggcggcaccaacacagagaagctggagaagctcatggtcaagatcggggtcttctccatcctctacacggtgcccgccacctgcgtcatcgtttgctatgtctacgaacgcctcaacatggacttctggcgccttcgggccacagagcagccatgcgcagcggccgcggggcccggaggccggagggactgctcgctgccagggggctcggtgcccaccgtggcggtcttcatgctcaaaattttcatgtcactggtggtggggatcaccagcggcgtctgggtgtggagctccaagactttccagacctggcagagcctgtgctaccgcaagatagcagctggccgggcccgggccaaggcctgccgcgcccccgggagctacggacgtggcacgcactgccactataaggctcccaccgtggtcttgcacatgactaagacggacccctctttggagaaccccacacacctctagccacacaggcctggcgcggggtggctgctgccccctccttgccctccacgccctgccccctgcatcccctagagacagctgactagcagctgcccagctgtcaaggtcaggcaagtgagcaccggggactgaggatcagggcgggaccccgtgaggctcattaggggagatgggggtctcccctaatgcgggggctggaccaggctgagtccccacagggtcctagtggaggatgtggaggggcggggcagaggggtccagccggagtttatttaatgatgtaatttattgttgcgttcctctggaagctgtgactggaataaacccccgcgtggcactgctgatcctctctggctgggaagggggaaggtaggaggtgaggc

SEQ ID NO: 337 - DNA, 60 bp, Homo sapiens
aatgatgtaatttattgttgcgttcctctggaagctgtgactggaataaacccccgcgtg

SEQ ID NO: 338 - DNA, 6263 bp, Homo sapiens
gtggatttggtcgtctccctgattccgagctgcgggcagggagaggggcctcgcgccgccctcagcagccggcggcggccgaggtagaccgagcggggacggaaggacagaccgacgtcgccgagctggaatcatgtgagggccaaccggggaaggtggagcagatgagcacacacaggagccgtctcctcaccgccgcccctctcagcatggaacagaggcggccctggccccgggccctggaggtggacagccgctctgtggtcctgctctcagtggtctgggtgctgctggcccccccagcagccggcatgcctcagttcagcaccttccactctgagaatcgtgactggaccttcaaccacttgaccgtccaccaagggacgggggccgtctatgtgggggccatcaaccgggtctataagctgacaggcaacctgaccatccaggtggctcataagacagggccagaagaggacaacaagtcttgttacccgcccctcatcgtgcagccctgcagcgaagtgctcaccctcaccaacaatgtcaacaagctgctcatcattgactactctgagaaccgcctgctggcctgtgggagcctctaccagggggtctgcaagctgctgcggctggatgacctcttcatcctggtggagccatcccacaagaaggagcactacctgtccagtgtcaacaagacgggcaccatgtacggggtgattgtgcgctctgagggtgaggatggcaagctcttcatcggcacggctgtggatgggaagcaggattacttcccgaccctgtccagccggaagctgccccgagaccctgagtcctcagccatgctcgactatgagctacacagcgattttgtctcctctctcatcaagatcccttcagacaccctggccctggtctcccactttgacatcttctacatctacggctttgctagtgggggctttgtctactttctcactgtccagcccgagacccctgagggtgtggccatcaactccgctggagacctcttctacacctcacgcatcgtgcggctctgcaaggatgaccccaagttccactcatacgtgtccctgcccttcggctgcacccgggccggggtggaataccgcctcctgcaggctgcttacctggccaagcctggggactcactggcccaggccttcaatatcaccagccaggacgatgtactctttgccatcttctccaaagggcagaagcagtatcaccacccgcccgatgactctgccctgtgtgccttccctatccgggccatcaacttgcagatcaaggggcgcctacagtcctgctaccagggcgagggcaacctggagctcaactggctgctggggaaggacgtccagtgcaccaaggcgcctgtccccatcgatgataacttctgtggactggacatcaaccagcccctgggaggctcaactccagtggagggcctgaccctgtacaccaccagcagggaccgcatgacctctgtggcctcctacgtttacaacggctacagcgtggtttttgtggggactaagagtggcaagctgaaaaagattcgggccgacggtcccccccatggtggggtccagtacgagatggtctctgtgctcaaggacggaagccccatcctccgggacatggccttctccattgatcagcgctacctgtacgtcatgtctgagagacaggtcaccagggtccccgtggagtcatgtgagcagtatacgacttgtggggagtgcctgagctctggggaccctcactgtggctggtgtgccctgcacaacatgtgctcccgcagggacaaatgccaacaggcctgggaacctaatcgatttgctgccagcatcagccagtgtgtgagccttgcagtgcatcccagcagcatctcagtatctgagcacagccggttgcttagcctggtagtgagtgatgctcctgatctatctgcgggtatcgcctgtgcctttgggaacctgacagaggtggaggggcaggtgtccgggagccaggtcatctgcatctcacctgggcccaaggatgtccctgtcatcccgctggatcaagactggtttgggctggagctacagctgaggtccaaggagacagggaagatatttgtcagcaccgagttcaagttttacaactgcagtgcccaccaactgtgcctgtcctgtgtcaacagcgccttccgctgccattggtgcaagtaccgcaacctctgcactcatgaccccaccacctgctccttccaggagggccggatcaatatttcagaggactgtccccagctggtgcccacagaggagatcttgattccagtcggggaggtaaagccaatcacccttaaggcgcgaaatctgccccagccgcagtccggccagcgaggctatgagtgtgtcctcaacatacaaggagccatccaccgggtccccgctctgcgcttcaacagctccagcgttcagtgtcagaacagctcgtaccagtatgatggcatggacatcagcaatctggccgtggatttcgctgtggtgtggaacggcaatttcatcattgacaaccctcaggacctgaaagtccatctctacaagtgtgcagcccagcgggagagctgcggcctctgcctcaaggccgaccggaagtttgagtgtggctggtgcagcggcgagcgcaggtgcaccctccaccagcactgtaccagcccttccagcccctggctcgactggtccagccacaatgtcaagtgctccaaccctcaaatcaccgagattttgacggtgtctggaccgccggaaggagggacgcgagtgaccatccatggcgtgaacctgggtctggacttctccgagatcgcccaccatgtgcaggtggctggggtgccctgcacgcccctcccaggggaatacatcatcgctgagcagattgtctgtgagatgggccatgccctcgtgggaaccacctccgggccagtacgcctgtgtattggcgagtgtaagccagagttcatgacgaagtcccatcagcagtacaccttcgtgaacccttctgtgctgtcactcaacccaatccgaggtcccgagtcaggaggcactatggtgaccattaccggccattaccttggggctgggagcagcgtggcagtctacctgggcaaccagacctgcgagttctacgggaggtcaatgagtgagatcgtgtgtgtctcacccccatcatccaatggccttggcccggtccctgtttctgtgagtgtcgaccgagcccatgtggatagcaacctgcagtttgagtacatagatgaccctcgggtccagcgcatcgagccagagtggagcattgccagtggccacacacccctgaccatcacaggcttcaacctggatgtcattcaggagccaaggatccgagtcaaattcaatggcaaagaatctgtcaatgtgtgtaaagttgtgaacacaaccaccctcacctgcctggcaccctctctgaccacggactaccgccctggcctggacactgtggaacgcccagatgagtttggatttgtctttaacaatgtccaatccttgctaatttacaacgacaccaagtttatctactaccccaacccgacctttgaactgcttagccctactggagtcttggatcaaaagccaggatcgcccatcattctgaagggcaaaaacctctgccctcctgcctctggaggggccaaactcaactacactgtgctcatcggagagaccccttgtgctgtcaccgtatctgagacccagcttctctgcgagcctcccaacctcaccgggcagcacaaggtcatggttcacgtgggcgggatggtgttctcgcctggctcggtgagtgtcatctcagacagcttgctgaccctgccagccatcgtcagcatcgcggccggcggcagcctcctcctcatcatcgtcatcatcgtcctcattgcctacaagcgcaagtctcgagaaaatgacctcactctcaagcggctgcaaatgcagatggacaatctggagtcccgtgtggccttggagtgcaaggaagcttttgctgagctccagacggatatcaatgagttgaccagtgacctggaccgctcaggaatcccttacctggactatcgtacctacgctatgcgagtcctgttcccgggcatcgaggaccaccccgtcctgcgggagctggaggtacaaggaaacgggcagcagcacgtggagaaggccctgaagctctttgcccagctcatcaacaacaaggtgttcctgctgaccttcatccgcaccctggagctgcagcgcagtttctccatgcgcgaccggggcaacgtggcttcgctcatcatgaccggcctgcagggccgcctggaatatgccactgatgtcctcaagcagctgctctctgacctcatcgataagaacctggagaacaagaaccaccccaagctgctactccggaggacagagtctgtggctgaaaagatgctgaccaattggttcgccttcctcctgcacaagttcctaaaggagtgcgcaggggagccactcttcatgctatactgtgccatcaagcagcagatggagaagggccccattgatgccatcacgggcgaggcccgctactccctgagcgaggacaagctcatccggcagcagatcgagtacaagaccctgatcctgaactgcgtcaaccctgacaacgagaacagtccagagatcccagtgaaggtgttaaactgtgacaccatcacacaggtcaaggagaagattcttgatgccgtgtataagaatgtgccctattcccagcggccgagggcagtggacatggacttggagtggcgccaaggccggatcgcccgggtcgtgctgcaagatgaggacatcaccaccaagattgagggtgactggaagcggctcaacacactgatgcattatcaggtgtcagacaggtcggtggtggctctggtccccaaacagacctcctcctacaacatccctgcctctgccagcatctcccggacgtccatcagcagatatgactcctccttcaggtatacgggcagccccgacagcctgcggtcccgggccccgatgatcaccccagacctggaaagtggggtcaaggtgtggcatctggtgaagaaccatgaccacggtgaccagaaggagggtgaccggggcagcaagatggtgtccgagatctacctgacccggctactggccaccaagggcaccctgcagaagtttgtggacgacttgtttgagaccttgttcagcactgtgcaccggggcagcgctctccccctggccatcaagtacatgtttgatttcctagatgagcaggcagacaggcacagcatccatgacacagatgtgcggcacacctggaaaagcaactgcctccctctgcgcttctgggtgaacgtgattaagaacccccagttcgtgtttgacatccacaagggcagcatcacggacgcctgcctctctgtggtggcccagaccttcatggactcttgttcaacgtcagagcaccggctgggcaaggactccccctccaacaagctgctctatgccaaggacatccccagctacaagagctgggtggagagatactacgcagacatcgccaagctcccagccatcagtgaccaggacatgaatgcctacctcgccgagcagtcccgcctgcacgccgtggagttcaacatgctgagtgccctcaatgagatctactcctatgtcagcaagtatagtgaggagctcatcggggccctagagcaggatgagcaggcacggcggcagcggctggcttataaggtggagcagctcattaatgccatgtccattgagagctgagaggaggagcctcgcattcctgggaagagggacctgtccaagctgtcacactgggagtctcagatggaaggacaagtgatggggatcaggccccagagcttgctgtcccctgagaccccatcctggggagaggggaggactcctctccctacgccagccaagtttcgtcatagccagttccagctgggagagacagtgggcgtcgtccatcctcagtgagaacaccagagaacccggggccgggagaaggtggttcttcaagccgagaggcacgagctggggacagttctgcctctgtgactgctgctttgcatgaaaactcatttgatgtatattggggaaataatgagaactttatttaattttttt

SEQ ID NO: 339 - DNA, 60 bp, Homo sapiens
gtgactgctgctttgcatgaaaactcatttgatgtatattggggaaataatgagaacttt

SEQ ID NO: 340 - DNA, 3129 bp, Homo sapiens
cccgcactaaagacgcttcttcccggcgggtaggaatcccgccggcgagccgaacagttccccgagcgcagcccgcggaccaccacccggccgcacgggccgcttttgtcccccgcccgccgcttctgtccgagaggccgcccgcgaggcgcatcctgaccgcgagcgtcgggtcccagagccgggcgcggctggggcccgaggctagcatctctcgggagccgcaaggcgagagctgcaaagtttaattagacacttcagaattttgatcacctaatgttgatttcagatgtaaaagtcaagagaagactctaaaaatagcaaagatgcttttgagccagaatgccttcatcttcagatcacttaatttggttctcatggtgtatatcagcctcgtgtttggtatttcatatgattcgcctgattacacagatgaatcttgcactttcaagatatcattgcgaaatttccggtccatcttatcatgggaattaaaaaaccactccattgtaccaactcactatacattgctgtatacaatcatgagtaaaccagaagatttgaaggtggttaagaactgtgcaaataccacaagatcattttgtgacctcacagatgagtggagaagcacacacgaggcctatgtcaccgtcctagaaggattcagcgggaacacaacgttgttcagttgctcacacaatttctggctggccatagacatgtcttttgaaccaccagagtttgagattgttggttttaccaaccacattaatgtgatggtgaaatttccatctattgttgaggaagaattacagtttgatttatctctcgtcattgaagaacagtcagagggaattgttaagaagcataaacccgaaataaaaggaaacatgagtggaaatttcacctatatcattgacaagttaattccaaacacgaactactgtgtatctgtttatttagagcacagtgatgagcaagcagtaataaagtctcccttaaaatgcaccctccttccacctggccaggaatcagaatcagcagaatctgccaaaataggaggaataattactgtgtttttgatagcattggtcttgacaagcaccatagtgacactgaaatggattggttatatatgcttaagaaatagcctccccaaagtcttgaggcaaggtctcgctaagggctggaatgcagtggctattcacaggtgcagtcataatgcactacagtctgaaactcctgagctcaaacagtcgtcctgcctaagcttccccagtagctgggattacaagcgtgcatccctgtgccccagtgattaagttttattatgtagaaaataaagagcaaacagtacagctgatatggactctctctctctttttttttttttttaagaattttcataactttttagcctggccatttcctaacctgccaccgttggaagccatggatatggtggaggtcatttacatcaacagaaagaagaaagtgtgggattataattatgatgatgaaagtgatagcgatactgaggcagcgcccaggacaagtggcggtggctataccatgcatggactgactgtcaggcctctgggtcaggcctctgccacctctacagaatcccagttgatagacccggagtccgaggaggagcctgacctgcctgaggttgatgtggagctccccacgatgccaaaggacagccctcagcagttggaactcttgagtgggccctgtgagaggagaaagagtccactccaggacccttttcccgaagaggactacagctccacggaggggtctgggggcagaattaccttcaatgtggacttaaactctgtgtttttgagagttcttgatgacgaggacagtgacgacttagaagcccctctgatgctatcgtctcatctggaagagatggttgacccagaggatcctgataatgtgcaatcaaaccatttgctggccagcggggaagggacacagccaacctttcccagcccctcttcagagggcctgtggtccgaagatgctccatctgatcaaagtgacacttctgagtcagatgttgaccttggggatggttatataatgagatgactccaaaactattgaatgaacttggacagacaagcacctacagggttctttgtctctgcatcctaacttgctgccttatcgtctgcaagtgttctccaagggaaggaggaggaaactgtggtgttcctttcttccaggtgacatcacctatgcacattcccagtatggggaccatagtatcattcagtgcattgtttacatattcaaagtggtgcactttgaaggaagcacatgtgcacctttcctttacactaatgcacttaggatgtttctgcatcatgtctaccagggagcagggttccccacagtttcagaggtggtccaggaccctatgatatttctcttctttcgttcttttttttttttttttgagacagagtctcgttctgtcgcccaagctggagcgcaatggtgtgatcttggctcactgcaacatccgcctcccgggttcaggtgattctcctgcctcagcctccctcgcaagtagctgggattacaggcgcctgccaccatgcctagcaaatttttgtatttttagtggagacaggattttaccatgttggccaggctggtctcgaactcctgacctcaagtgatctgccctcctcagcctcgtaaagtgctgggattacaggggtgagccgctgtgcctggctggccctgtgatatttctgtgaaataaattgggccagggtgggagcagggaaagaaaaggaaaatagtagcaagagctgcaaagcaggcaggaagggaggaggagagccaggtgagcagtggagagaaggggggccctgcacaaggaaacagggaagagccatcgaagtttcagtcggtgagccttgggcacctcacccatgtcacatcctgtctcctgcaattggaattccaccttgtccagccctccccagttaaagtggggaagacagactttaggatcacgtgtgtgactaatacagaaaggaaacatggcgtcggggagagggataaaacctgaatgccatattttaagttaaaaaaaaaaaa

SEQ ID NO: 341 - DNA, 60 bp, Homo sapiens
gtggaaatttcacctatatcattgacaagttaattccaaacacgaactactgtgtatctg

SEQ ID NO: 342 - DNA, 3138 bp, Homo sapiens
ctcttgacagcggcggcggcgcagccggttccgggttcggcgcggggcggggatgtgaatcccgatggagcggcccgaggaaggcaagcagtcgccgccgccgcagccctggggacggctcctgcgtctgggcgcggaggagggcgagccgcacgtcctcctgaggaagcgggagtggaccatcgggcggagacgaggttgcgacctttccttccccagcaataaactggtctctggagatcactgtagaattgtagtggatgaaaaatcaggtcaggtgacactggaagataccagcaccagtggaacagtgattaacaagctgaaggttgttaagaagcagacatgccctttacagactggggatgtcatctacttggtgtacaggaagaatgaaccggaacacaacgtggcatacctctatgaatctttaagtgaaaagcaaggcatgacacaagaatcctttgagatggtgccttgctgtgttgcccaggctggtctaaaactcctgggatcaagtgatcctcccaccttggcctcccaaagtattgtgattacagggtctgggggtggtggcatctcccctaaaggaagtggtccctctgtggcaagtgatgaagtctccagctttgcctcagctctcccagacagaaagactgcgtccttttcgtcgttggaaccccaggatcaggaggatttggagcccgagaagaagaaaatgagaggagatggggaccttgacctgaacgggcagttgttggtcgcacaaccgcgtagaaatgcccaaaccgtccacgaggacgtcagagcagcggctgggaagccagacaagatggaggagacgctgacatgcatcatctgccaggacctgctgcacgactgcgtgagtttgcagccctgcatgcacacgttctgcgcggcttgctactcgggctggatggagcgctcgtccctgtgtcctacctgccgctgtcccgtggagcggatctgtaaaaaccacatcctcaacaacctcgtggaagcatacctcatccagcatccagacaagagtcgcagtgaagaagatgtgcaaagtatggatgccaggaataaaatcactcaagacatgctgcagcccaaagtcaggcggtctttttctgatgaagaagggagttcagaggacctgctggagctgtcagacgttgacagtgagtcctcagacattagccagccatacgtcgtgtgccggcagtgtcctgagtacagaaggcaggcggcgcagcctccccactgcccagcacccgagggcgagccaggagccccacaggccctgggggatgcaccccccacgtccgtcagcctgacgacagcagtccaggattacgtgtgccctctgcaaggaagccacgccctgtgcacctgctgcttccagcccatgcccgaccggagagcggagcgcgagcaggacccgcgtgtcgcccctcagcagtgtgcggtctgcctgcagcctttctgccacctgtactggggctgcacccggaccggctgctacggctgcctggccccgttttgtgagctcaacctgggtgacaagtgtctggacggcgtgctgaacaacaacagctacgagtcagacatcctgaagaattacctggcaaccagaggtttgacatggaaaaacatgttgaccgagagcctcgtggctctccagcggggagtgtttctgctgtctgattacagagtcacgggagacaccgttctgtgttactgctgtggcctgcgcagcttccgtgagctgacctatcagtatcagcagaacattcctgcttccgagttgccagtggccgtaacatcccgtcctgactgctactggggccgtaactgccgcactcaggtgaaagctcaccacgccatgaaattcaatcatatctgtgaacagacaaggttcaaaaactaagcatccagaggccctgagcagctttcagcactggaggtgaagagagcgtgtttttaaaatacagaggcaagcacgtcaaggtgttttcacagccccctgagggaagggacgcagggtctccgacaggtgctctggggtgactcttctgtggagctttaccctctgagtgagaccctccccagagccccgggggccgcagcccgccctcctggtgagcgctgggcagggctcgtggtggcatcagcagcagagacgaagcctttctgtaacatgcggccgtcctgccgagaggggcagttttgctcttttgtacattttccgaaactacagttaaagcggaagtctgttttcaggaaaagtttcaagggagaagggcaagtttatcaaaaacattgtttcaggagaagggagcataagtttacagcctacaggacgtacacaatatcctgctgctgggaaaaccacagcattttatctattttttattttaataggtttggtgcttatcttctaataagatttaaatgtcacaaactgtagcacaaataatataatttataatttacaaattgactaaaattgggtatagtatggtatttgaaagaataagcatatgcttctgtttattaaaaaaagaaaccttccaatgtccaaaactgctaaccctcgacgtggccgccaagttagtcgctccttgctaaccggtgagtgaccgcggccccgagcctggggctggacgcaggtcccaggacatgctgctcccttgtgtgagtgaccgcggccccgagcctggggctggacgcaggtcccaggacgtgctgctcccttgtgtgagtgaccacggccccaagcccagggctggaggcaggtcccaggacgcgccgctccctcatgctgcccgggcccttcctccaagaccctacagagcctgaggggcaccttggcttccgcctgtgctagctttgccatgtcatctggaataatacttgaaattttgattcttggaaaaaaaagtttcttatcttttgttgaaatcacctgttatccttgtttgtaaactgataacttttttgcttcttctcaggaatacagttttcaactgttgtcttgctcttgatagaaactgagaagcagcaatctgtatttgtggaggaaagtcctctcttttgcatattctaataaatgagccgcgtttgctcctc

SEQ ID NO: 343 - DNA, 60 bp, Homo sapiens
gcttcttctcaggaatacagttttcaactgttgtcttgctcttgatagaaactgagaagc

SEQ ID NO: 344 - DNA, 2134 bp, Homo sapiens
gcacgagcgccggttcagcgcagcccggagtcgcccaggcctgaactcctacccaggtccccggcccccgccccgggcccgcgaggacaccggaggccaccccccgggggtggggagcggagccgcggcctagactcaagtctgggtttcagctgccgccagccctattgctgctgttgctgttctctgtccttggcccaggggctggaggccttttcctgactgattactccacctgctcaccccgcaagctgagtcctttccgctcctttgccagcaccgagctcttccacttccatgttcctgaggacacattcctggctgtttggaacctcatcatcttcaaggagcaagggggaacttttggggaccactgcccagaccaaagtgtgactgtgtatttccggtccggggcaccccctgtcatcaatcccctgcatacacacttcccaggggacacagctgtgcctggggttttctcactgaccctcagctggacactgcccaaccgcacctcaggcatctttaacgtcagcagccccttacctggggactggttcttggctgcccaccttccccaggcccacggccacatctctgtcaagggtctccaggatgagtgtcagtacctccttcagccgcagctgattgtccggcgtttgctggacgtcgctgtgctggttcctggccggccctcagagcaaaccctctccccacacaatcgctcagccctgtacaaggtctttgtgcccagcttcacttacagggtttcagcacagctggtgtgtgtggggggccgtggggtatctgcctgccccctgtcactgcgtctgcgtcccaaagccccacccctgcacaactcaagctctgtggcctgtggaggtgcctcaggatgccagctggagctggcactgcccccctgggggcactgggtctacgtgcgtgtggaaacatcatcccggggccctggtaggaccatccgcttccagctgtgtgtgcagttgcaagagtgcccacagcccggcctgctccgagccctggtccctggagctgccatgaacatgccccagtccctgggcaaccagccactgcccccagaaccgccatcccttggaacccctgcggaggggcctgggaccacgtccccacccgagcactgctggccagtgcgcccgactctgcgcaacgagctggacaccttctctgtccacttctacatcttctttggcccaagtgtggcccttccccctgagcgcccagccgtgttcgccatgaggctgttgccagtgctggacagtggaggcgtcctcagcctggagctccagctcaatgcgagctccgtgcgccaggaaaacgtgacggtgtttggatgcttgactcacgaggtgcccttgagcctgggggatgcagcagtgacctgttccaaagagtccctggccggcttcctcctctctgtcagtgccaccaccagggttgccaggctgcgaatcccattcccgcagacggggacctggttcctggccctccgctccctgtgcggggtggggcctcggttcgtgcggtgccgcaacgcgacggccgaggtgcggatgcgcaccttcctgtccccatgcgtggacgactgcgggccctacggccagtgcaagctgctgcgcacacacaattatctgtacgcagcctgcgagtgcaaggccgggtggagaggctggggctgcaccgacagtgcagatgcgctcacctatggattccagctgctgtccacactcctgctctgcctgagcaacctcatgtttctgccacctgtggtcctggccattcggagtcgatatgtgctggaagctgcagtctacaccttcaccatgttcttctccacggtatgcggtggtgtctgcatcttatcactgggtgcttgtgcatggtggtgggtcacagtctgtatttccaccacgttctccgagggtttgggaatgtctgtgccttcactgtgtcttctacagacagagacagcagtgcttcccaaactgtcatgcatagataatggtcatttttgtaagacacattggagtaaatgaacaaaactgtttgcaacttaataaagtaagtttgggcctccaaaaaaaaaaaaaaaaaaaaa

SEQ ID NO: 345 - DNA, 60 bp, Homo sapiens
cttcccaaactgtcatgcatagataatggtcatttttgtaagacacattggagtaaatga

SEQ ID NO: 346 - DNA, 2820 bp, Homo sapiens
ccgcggagttacgggaaagttggtccgagttcccagagtttccctctgtggtgccctaggcttcggcccggtgccccggctcctttcctcctttcggccttcgccgtccaccaggtccctctctctgtcccggccgccatggagcagccgccggcgcctaagagtaaactaaaaaagctgagtgaagacagtttgactaagcagcctgaagaagtttttgatgtattagagaagcttggagaagggtcttatggaagtgtatttaaagcaatacacaaggaatccggtcaagttgtcgcaattaaacaagtacctgttgaatcagatcttcaggaaataatcaaagaaatttccataatgcagcaatgtgacagcccatatgttgtaaagtactatggcagttattttaagaatacagacctctggattgttatggagtactgtggcgctggctctgtctcagacataattagattacgaaacaagacattaatagaagatgaaattgcaaccattcttaaatctacattgaaaggactagaatatttgcactttatgagaaaaatacacagagatataaaagctggaaatattctcctcaatacagaaggacatgcaaaattggcagattttggagtggctggtcagttaacagatacaatggcaaaacgcaatactgtaataggaactccattttggatggctcctgaggtgattcaagaaataggctataactgtgtggccgacatctggtcccttggcattacttctatagaaatggctgaaggaaaacctccttatgctgatatacatccaatgagggctatttttatgattcccacaaatccaccaccaacattcagaaagccagaactttggtccgatgatttcaccgattttgttaaaaagtgtttggtgaagaatcctgagcagagagctactgcaacacaacttttacagcatccttttatcaagaatgccaaacctgtatcaatattaagagacctgatcacagaagctatggagatcaaagctaaaagacatgacgaacagcaacgagaattggaagaggaagaagaaaattcggatgaagatgagctggattcccacaccatggtgaagactagtgtgggagagtgtggcaccatgcgggccacaagcacgatgagtgaaggggcccagaccatgattgaacataatagcacgatgttggaatccgacttggggaccatggtgataaacagtgaggatgaggaagaagaagatggaactatgaaaagaaatgcaacctcaccacaagtacaaagaccatctttcatggactactttgataagcaagacttcaagaataagagtcacgaaaactgtaatcagaacatgcatgaacccttccctatgtccaaaaacgtttttcctgataactggaaagttcctcaagatggagactttgactttttgaaaaatctaagtttagaagaactacagatgcggttaaaagcactggaccccatgatggaacgggagatagaagaacttcgtcagagatacactgcgaaaagacagcccattctggatgcgatggatgcaaagaaaagaaggcagcaaaacttttgagtctaatttcctctctgtttttaactattctggagaccaagaaaccactaggaattgaaggaatatttggatatttttaatcctaagattttgccctacaattaggcagaggtcaaaaagtgacaatggtacatgcccaggtaaattcccaaaaggcagaattgacagttgtatctgctgtgcattcactctaagatgaggagaacaaaagaagtgtattctcttgttctgtcagctgcataccagtaataaaactgttatgaaatggattttcaaggtctctaaaccttgaaaatccaaaggctattgttgcattgtacagcactgaaagggctttatgttacaatattctttattcctatctagtatactaggctatttattgtccccttaggtaaacttatttatttatgctattttggctttgtttcattttttaaggacaagatcaggatagctttggtgaaggtagggtcatattaatatgatgataatgtgcaaccaatttatactttctgcagggagctatggggtacattccttgatttccaggatagtttttcaaataggaaagcaataatggcagtagttctcaaatgggctaggccttttttatattgaagcaataattccatttttaccctttgaaattttgtttttttgatttttgatgtttggtacaaatagaactatatatatttaggtaaaatagatctatcgtgtttaaaaccaaagaaatcaatggaacccttgcacaaaaaagtgtgataaatatttttaaataaaaacttaatacaaatgtaatttgttaatattgtttcatgttttatgtgtagatctaatagctgaactgattcaaactgtaataagctcatcaatttcatttctatgaaaatgtgctctgttgtcacaggatgtttctgttgattttattcatttcctgggaattggtaaacatcatgttcctgatgataacccagtagcaaaaacatttgtactgagtggtacaagccttggggactgaaaaaaaaaaaagattaaaaccattaaaaagaaactcatttttacgctgaatgaacatttatatgattgcattgggaccagtcatttcctaagctacatatggccatcttgacagtgttttttcttttgtgtgtttaattattatgtgtaaatcataaagacaaataaatttcactgtgccac

SEQ ID NO: 347 - DNA, 60 bp, Homo sapiens
aattggtaaacatcatgttcctgatgataacccagtagcaaaaacatttgtactgagtgg

SEQ ID NO: 348 - DNA, 2226 bp, Homo sapiens
ctcctctgcgcttccgtggagcctccaggccgacccccgggaactggaggaccccaggaggctgcgcgcgtctccctgcccacagcagcgcggctgcctgattcccggcgccgcgaaatgcgccttctcgggagcccccactggctcggcgaaaacttactgacgataagatcaattcggaaccgaagattaaaaaactggagccagtccttttgccaggagaaattgtcgtaaatgaagtcaattttgtgagaaaatgcattgcaacagacacaagccagtacgatttgtggggaaagctgatatgcagtaacttcaaaatctcctttattacagatgacccaatgccattacagaaattccattacagaaaccttcttcttggtgaacacgatgtccctttaacatgtattgagcaaattgtcacagtaaacgaccacaagaggaagcagaaagtcctaggccccaaccagaaactgaaatttaatccaacagagttaattatttattgtaaagatttcagaattgtcagatttcgctttgatgaatcaggtcccgaaagtgctaaaaaggtatgccttgcaatagctcattattcccagccaacagacctccagctactctttgcatttgaatatgttgggaaaaaataccacaattcagcaaacaaaattaatggaattccctcaggagatggaggaggaggaggaggaggaggtaatggagctggtggtggcagcagccagaaaactccactctttgaaacttactcggattgggacagagaaatcaagaggacaggtgcttccgggtggagagtttgttctattaacgagggttacatgatatccacttgccttccagaatacattgtagtgccaagttctttagcagaccaagatctaaagatcttttcccattcttttgttgggagaaggatgccactctggtgctggagccactctaacggcagtgctcttgtgcgaatggccctcatcaaagacgtgctgcagcagaggaagattgaccagaggatttgtaatgcaataactaaaagtcacccacagagaagtgatgtttacaaatcagatttggataagaccttgcctaatattcaagaagtacaagcagcatttgtaaaactgaagcagctatgcgttaatgagccttttgaagaaactgaagagaaatggttatcttcactggaaaatactcgatggttagaatatgtaagggcattccttaagcattcagcagaacttgtatacatgctagaaagcaaacatctctctgtagtcctacaagaggaggaaggaagagacttgagctgttgtgtagcttctcttgttcaagtgatgctggatccctattttaggacaattactggatttcagagtctgatacagaaggagtgggtcatggcaggatatcagtttctagacagatgcaaccatctaaagagatcagagaaagagtctcctttatttttgctattcttggatgccacctggcagctgttagaacaatatcctgcagcttttgagttctccgaaacctacctggcagtgttgtatgacagcacccggatctcactgtttggcaccttcctgttcaactcccctcaccagcgagtgaagcaaagcacggtcagtaggataaaaagttgtacaaaacaagattattttccttcacgagtttgaagtttctggtcacaattcattgatgtagaggatttatgactaagcagggtctcaagccaaacttgaaaccattctgaaccaaagtgccatttcacccacctcgaaccaacaacagaagctgacaaatgccgtggagaccattgagggaaacagaaaggggcagctcttgtggaccttcaggaagcctttctaggaagaggattgccctcatagtgagctccggggtcttcagcctcagccgtaaggccctgggctaggcagtgtgacctagggagcgggaaacctgagttctggccctggtctgggaaaagtgctaggcccatgttccactcaggcttcagcctgagagtccaggttgctaacctgtaaaatggatctgtcaaactaacacttatgcctttagtctcattgtatgaggtgtaacattttgtaaactgtgaatcattatgcaaattttcctaaagacatatgaattattctggatttgttggtataaaagacaaaatacactggtcaaaaaaaaaaa

SEQ ID NO: 349 - DNA, 60 bp, Homo sapiens
tgttgttcaacagtattgagtgtgaaggaaattttgatggcttaataaaattccacagcg

SEQ ID NO: 350 - DNA, 1707 bp, Homo sapiens
gcggcggcgccgctgccggctaacgcggaggggcgcctggaggcggcgtggcgtccgctctggctccgactccggctctcgctctcgcttctagcccgcgtgcctgcgcagtcccctccccgagaaccatccccttgccccgcccagcgtcaggggtgcgcggccgccgagagaccccggaggcgtagccggctgcggaggcgaagaggtggcagcgcgagctgggaccagcgtctcggaggcgccgcagaattcacagatggattcagtggaaaagacaacaaatagaagtgaacaaaaatccagaaagtttttaaaaagcctcatccggaaacagccccaggaactgctcctggttatcgggactggcgtcagcgcagcagtggcccccggaatccctgccctttgctcgtggagaagctgcatcgaggccgtcatcgaggctgcagagcagctggaggtgctgcaccccggagacgtcgccgagttccggaggaaagtgacaaaggaccgggacctgttggttgtcgcccatgatctgatccggaagatgtcacctcgcacaggcgatgccaagcccagcttcttccaggactgcctgatggaggtgtttgacgacctggagcagcacatccggagtcctctggtgctgcagtcgatcctcagcctgatggacagaggcgccatggtcctgaccaccaactatgacaacctgctggaggcctttggccggcggcagaacaagcccatggagtccctggacttgaaggacaagaccaaggtccttgaatgggcaagagggcacatgaagtacggcgtcctccacattcacggcctctacacggacccctgcggggtggtgctggacccatcggggtataaagacgtcactcaagacgcagaagtcatggaagtcctccagaacttataccgcaccaagtcctttctgtttgtgggctgtggggagacccttcatgatcagatattccaggccctctttctttactccgtgccgaataaggtggatttggagcactacatgcttgtgctgaaggagaatgaagaccatttctttaagcatcaggcagatatgcttctgcacggaatcaaagttgtatcctacggggactgttttgaccactttccaggatatgtgcaagaccttgccactcagatctgcaaacagcaaagcccagatgctgatcgcgtggacagcaccacattattgggtaatgcatgccaggactgtgcaaagaggaagttagaagagaatggaattgaagtttcaaaaaaacgcacacaatcagatactgatgatgctggagggtcttgaaatctttacagtaaaacctgcaacttgaaaactagccttctgtaaccacagtgcccaaacgaagaggaatgtatggagaactccacgtggatctctgattgcgaaaccgtcacatacaccaagagagccacatgggcatgtggccctgaaggctgggtgagagggctcccctgtgtgttgaactatgcaggagggtgacgcggacacatttcaggtggactttgcaaggactgatggatagctacctcagggaccagaatccgtgggaagggatggacctggtgttcccgttcccatctgacaggctctcttttgtcaaggtggtatttttcgtaataaaaggggaagagtaaagacaaaaaaaaaaaaaaaaa

SEQ ID NO: 351 - DNA, 60 bp, Homo sapiens
atctgacaggctctcttttgtcaaggtggtatttttcgtaataaaaggggaagagtaaag

SEQ ID NO: 352 - DNA, 2100 bp, Homo sapiens
ccggttctcgccggctctcggacccgcctccgaagacgtggagcgctgcggcggctgatttgtcaaagatgaaagtgaccttatcagctttggatacttctgagagttctttcacacctttggtggtcatagaacttgctcaggatgtcaaagaagaaaccaaagaatggctgaaaaacagaattatagctaaaaaaaaaagatggaggtgcccagttgttgtttagaccattgttaaataaatatgaacaagaaacactagaaaatcagaacttatatcttgttggtgcctccaagattagaatgttactaggggcagaagcagtgggattggtaaaagagtgcaatgataacaccatgagagccttcacatacagaaccagacagaacttcaaaggttttgatgataacaatgatgatttcctgacaatggcagaatgtcaattcattatcaaacatgaacttgaaaatcttagagctaaagatgaaaaaatgatccctggttaccctcaggcaaagttgtatccaggaaaatcattgttgagaagattgctcacgtctggcatcgtgattcaggtgtttccactgcatgacagtgaagccctgaagaagcttgaggacacctggtacactcggtttgctttgaagtatcagcccatagagaatcacagattggaatctgcctatcagaaccatctaattctgaaagttttagtgttcaacttcctcaattgctttgcctcactcttctatattgcctttgtcttgaaagatatgaagcttttgcgccagagcttggccactctcctaattacctcccagatcctcaaccaaattatggaatcttttcttccttattggctccaaaggaagcatggtgtgcgggtgaagaggaaggtgcaggctttaaaggcagacattgatgctacattatatgaacaagtcatcctggaaaaagaaatgggaacttatttgggcacctttgatgattacttggagttattcctgcagtttggttatgtgagccttttctcctgtgtttacccattagcagctgcctttgctgtgttaaataacttcactgaagtaaattcagatgccttaaaaatgtgcagggtcttcaaacgtccattctcagaaccttcagccaatattggtgtgtggcagttggcttttgaaatgatgagtgttatatctgtggtcactaactgtgcgctgattggaatgtcaccacaagtgaatgcagcctttccagaatcaaaagcagacctcattttgattgtagtagcagtggagcacgcactcctggctttaaagtttatacttgcatttgccatacctgataagccacggcatatccagatgaaactagccagactggaatttgagtctttggaggcactcaagcagcagcaaatgaagctcgtgaccgagaacctgaaggaggaaccaatggaaagcgggaaggagaaggcaacctgagtgcccagcgtgcccagctgccctgttggcagaggcctgtgtctgtgccacacctgccacggtggcagggggggtacccggggcagcatcgtggctcctgaacccagacccaatgcttagccaaacgaagtggctcccatgtggcaagcacccttctcagtttcgcagtggcttggctcgggatccttggcagttcccccagccccaccctgtctgctccttcccagttccttcccgggccccacacgctgctccagctgccaactttgctgcagagccactgccgcccttgagcctctcaccatgagtgagccaccagctctccacgttcccctcatagcagtgtcactcccaaccccaccatggcccagggacccgtggacaggttggggatggggtgtgtgcccactgtgctcatcacaggagcctcagttgagagtgagcggggtacagtaaggcagtgcttcccacactggacctctttcctggttctcttttgcaatacattaacagaccctttatcaacataaacaatagtaactgagctattaaaggcaaaaaaaaaaaaaaaaaaaaaaaaaaaaaaaaaaaaaaaaaaaaaaaaaaaaaaaaaaaaaa

SEQ ID NO: 353 - DNA, 60 bp, Homo sapiens
cattaacagaccctttatcaacataaacaatagtaactgagctattaaaggcaacctctc

SEQ ID NO: 354 - DNA, 1741 bp, Homo sapiens
agcggagcgcggaggccgctgggacgcggttcagctcattccctgaggccggcccgcgtcccgtcaggcgccgcgcggggttagcgcggggtcagcggaggtcagcgggggtcagcagcagcggctccgagggcgcggcggacgcaggatgtacacgctgctgtcgggcttgtacaagtacatgtttcagaaggacgagtactgcatcctgatcctgggcctggacaatgctgggaagacgaccttcctggagcagtcgaaaacccgatttaacaagaactacaaggggatgagtctatccaaaatcaccaccaccgtgggcctaaacatcggcactgtggatgtgggaaaggctcggctcatgttctgggacttaggagggcaggaagagctgcagtctttgtgggacaagtattatgcggagtgtcacggcgtcatctacgtcattgactccaccgacgaggagaggctggctgagtccaagcaggcgtttgagaaggtggtgaccagcgaggcgctgtgcggtgtccccgtcttggtgctggccaacaagcaggatgtggagacgtgcctctcaatccctgacatcaagacggccttcagcgactgcaccagcaagatcggcaggcgagattgcctgacccaggcctgctcggccctcacaggcaaaggggtgcgcgagggcatcgagtggatggtgaagtgtgtcgtgcggaatgtgcaccggccgccgcggcagagggacatcacgtaggcgcagccgcgctgccgtcgggacggctggtcccctggtgctggaggagtggcctcctgttggctcccatgctgctgatctggggggtgggtttgctttgctttggggttcttctatttactttgttttctcgaagacaaactttcctctatgtctggaaaagcgtaggcatccggaggctttggaggggagtctggcagcccggctggcccaggccctgcagcggcagcctttccacagggcgcagcggcggcctttcgaggccctttctggggggtctgagggagacctggttgggaattggggctccagtgctcaggctggcttgggctgcatgaggacagccctgtgggaccctcgggagaccccgtggctgtctccgccccatcgaggaggaggcccgtcagccatggctgccatctggcttctgccctgtgaccccgtgaccccgtgaccccggaagtggtctggggctgatcttgccttgaggaagacccaggccatgttcccaaaggccagcgggggccctggattgtgatgcagcctcgggacagggctgaggcctgcgggggaagacctataccccacgcctgggcctggcttcacctcaccctaatcccccgggagggagctgactgatgcaaaaagctgagggggcctgctgggagtggctgtttttatgccccagccccgcaagttggggagtgtttgtgggggtccagagccctcccccagccaggagagaacctcccggaggggttctctgtggggccctgtgtcccctgctcgggagtaaggctggtcctggggtcctccctgcacggaccccactgggcctgccgagtgctgtgttcttcctcagtctggctgtgggcaggagcggcctgcccagtgtcacccagggtgagtgcaaaataaagacggcgagtgtggctctgtccatcccttccctcctggagggtggaggctcctggctgttggacacgg

SEQ ID NO: 355 - DNA, 60 bp, Homo sapiens
tgttttctcgaagacaaactttcctctatgtctggaaaagcgtaggcatccggaggcttt

SEQ ID NO: 356 - DNA, 2857 bp, Homo sapiens
ttccccatctgaggcgtttgttgcagctacctgcacttctagatgctccccaggttcatcctgtgtcgtctcccccacctaccagtcatcttcttgtgagccctgggcttaggagtcaccatggcaactgaagagttcatcatccgcatccccccataccactatatccatgtgctggaccagaacagcaacgtgtcccgtgtggaggtcgggccaaagacctacatccggcaggacaatgagagggtactgtttgcccccatgcgcatggtgaccgtccccccacgtcactactgcacagtggccaaccctgtgtctcgggatgcccagggcttggtgctgtttgatgtcacagggcaagttcggcttcgccacgctgacctcgagatccggctggcccaggaccccttccccctgtacccaggggaggtgctggaaaaggacatcacacccctgcaggtggttctgcccaacactgccctccatctaaaggcgctgcttgattttgaggataaagatggagacaaggtggtggcaggagatgagtggcttttcgagggacctggcacgtacatcccccggaaggaagtggaggtcgtggagatcattcaggccaccatcatcaggcagaaccaggctctgcggctcagggcccgcaaggagtgctgggaccgggacggcaaggagagggtgacaggggaagaatggctggtcaccacagtaggggcgtacctcccagcggtgtttgaggaggttctggatttggtggacgccgtcatccttacggaaaagacagccctgcacctccgggctcggcggaacttccgggacttcaggggagtgtcccgccgcactggggaggagtggctggtaacagtgcaggacacagaggcccacgtgccagatgtccacgaggaggtgctgggggttgtgcccatcaccaccctgggcccccacaactactgcgtgattctcgaccctgtcggaccggatggcaagaatcagctggggcagaagcgcgtggtcaagggagagaagtcttttttcctccagccaggagagcagctggaacaaggcatccaggatgtgtatgtgctgtcggagcagcaggggctgctgctgagggccctgcagcccctggaggagggggaggatgaggagaaggtctcacaccaggctggggaccactggctcatccgcggacccctggagtatgtgccatctgccaaagtggaggtggtggaggagcgccaggccatccctctagacgagaacgagggcatctatgtgcaggatgtcaagaccggaaaggtgcgcgctgtgattggaagcacctacatgctgacccaggacgaagtcctgtgggagaaagagctgcctcccggggtggaggagctgctgaacaaggggcaggaccctctggcagacaggggtgagaaggacacagctaagagcctccagcccttggcgccccggaacaagacccgtgtggtcagctaccgcgtgccccacaacgctgcggtgcaggtgtacgactaccgagagaagcgagcccgcgtggtcttcgggcctgagctggtgtcgctgggtcctgaggagcagttcacagtgttgtccctctcagctgggcggcccaagcgtccccatgcccgccgtgcgctctgcctgctgctggggcctgacttcttcacagacgtcatcaccatcgaaacggcggatcatgccaggctgcaactgcagctggcctacaactggcactttgaggtgaatgaccggaaggacccccaagagacggccaagctcttttcagtgccagactttgtaggtgatgcctgcaaagccatcgcatcccgggtgcggggggccgtggcctctgtcactttcgatgacttccataagaactcagcccgcatcattcgcactgctgtctttggctttgagacctcggaagcgaagggccccgatggcatggccctgcccaggccccgggaccaggctgtcttcccccaaaacgggctggtggtcagcagtgtggacgtgcagtcagtggagcctgtggatcagaggacccgggacgccctgcaacgcagcgtccagctggccatcgagatcaccaccaactcccaggaagcggcggccaagcatgaggctcagagactggagcaggaagcccgcggccggcttgagcggcagaagatcctggaccagtcagaagccgagaaagctcgcaaggaacttttggagctggaggctctgagcatggccgtggagagcaccgggactgccaaggcggaggccgagtcccgtgcggaggcagcccggattgagggagaagggtccgtgctgcaggccaagctaaaagcacaggccttggccattgaaacggaggctgagctccagagggtccagaaggtccgagagctggaactggtctatgcccgggcccagctggagctggaggtgagcaaggctcagcagctggctgaggtggaggtgaagaagttcaagcagatgacagaggccataggccccagcaccatcagggaccttgctgtggctgggcctgagatgcaggtaaaactgctccagtccctgggcctgaaatcaaccctcatcaccgatggctccactcccatcaacctcttcaacacagcctttgggctgctggggatggggcccgagggtcagcccctgggcagaagggtggccagtgggcccagccctggggaggggatatccccccagtctgctcaggcccctcaagctcctggagacaaccacgtggtgcctgtactgcgctaactcctgattaatacaatggaagtttctgggcaaaaaaaaaaaaaaaaagtttcca

SEQ ID NO: 357 - DNA, 60 bp, Homo sapiens
caaccacgtggtgcctgtactgcgctaactcctgattaatacaatggaagtttctgggca

SEQ ID NO: 358 - DNA, 3609 bp, Homo sapiens
ggcacgaggagccctgagagtccgccgccaacgcgcaggtgctagcggccccttcgccctgcagcccctttgcttttactctgtccaaagttaacatgtcactgaaaaacgagccacgggtaaatacctctgcactgcagaaaattgctgctgacatgagtaatatcatagaaaatctggacacgcgggaactccactttgagggagaggaggtagactacgacgtgtctcccagcgatcccaagatacaagaagtgtatatccctttctctgctatttataacactcaaggatttaaggagcctaatatacagacgtatctctccggctgtccaataaaagcacaagttctggaagtggaacgcttcacatctacaacaagggtaccaagtattaatctttacactattgaattaacacatggggaatttaaatggcaagttaagaggaaattcaagcattttcaagaatttcacagagagctgctcaagtacaaagcctttatccgcatccccattcccactagaagacacacgtttaggaggcaaaacgtcagagaggagcctcgagagatgcccagtttgccccgttcatctgaaaacatgataagagaagaacaattccttggtagaagaaaacaactggaagattacttgacaaagatactaaaaatgcccatgtatagaaactatcatgccacaacagagtttcttgatataagccagctgtctttcatccatgatttgggaccaaagggcatagaaggtatgataatgaaaagatctggaggacacagaataccaggcttgaattgctgtggtcagggaagagcctgctacagatggtcaaaaagatggttaatagtgaaagattcctttttattgtatatgaaaccagacagcggtgccattgccttcgtcctgctggtagacaaagaattcaaaattaaggtggggaagaaggagacagaaacgaaatatggaatccgaattgataatctttcaaggacacttattttaaaatgcaacagctatagacatgctcggtggtggggaggggctatagaagaattcatccagaaacatggcaccaactttctcaaagatcatcgatttgggtcatatgctgctatccaagagaatgctttagctaaatggtatgttaatgccaaaggatattttgaagatgtggcaaatgcaatggaagaggcaaatgaagagatttttatcacagactggtggctgagtccagaaatcttcctgaaacgcccagtggttgagggaaatcgttggaggttggactgcattcttaaacgaaaagcacaacaaggagtgaggatcttcataatgctctacaaagaggtggaactcgctcttggcatcaatagtgaatacaccaagaggactttgatgcgtctacatcccaacataaaggtgatgagacacccggatcatgtgtcatccaccgtctatttgtgggctcaccatgagaagcttgtcatcattgaccaatcggtggcctttgtgggagggattgacctggcctatggaaggtgggacgacaatgagcacagactcacagacgtgggcagtgtgaagcgggtcacttcaggaccgtctctgggttccctcccacctgccgcaatggagtctatggaatccttaagactcaaagataaaaatgagcctgttcaaaacctacccatccagaagagtattgatgatgtggattcaaaactgaaaggaataggaaagccaagaaagttctccaaatttagtctctacaagcagctccacaggcaccacctgcacgacgcagatagcatcagcagcattgacagcacctccagttattttaatcactatagaagtcatcacaatttaatccatggtttaaaaccccacttcaaactctttcacccgtccagtgagtctgagcaaggactcactagacctcatgctgataccgggtccatccgtagtttacagacaggtgtgggagagctgcatggggaaaccagattctggcatggaaaggactactgcaatttcgtcttcaaagactgggttcaacttgataaaccttttgctgatttcattgacaggtactccacgccccggatgccctggcatgacattgcctctgcagtccacgggaaggcggctcgtgatgtggcacgtcacttcatccagcgctggaacttcacaaaaattatgaaatcaaaatatcggtccctttcttatccttttctgcttccaaagtctcaaacaacagcccatgagttgagatatcaagtgcctgggtctgtccatgctaacgtacagttgctccgctctgctgctgattggtctgctggtataaagtaccatgaagagtccatccacgccgcttacgtccatgtgatagagaacagcaggcactatatctatatcgaaaaccagtttttcataagctgtgctgatgacaaagttgtgttcaacaagataggcgatgccattgcccagaggatcctgaaagctcacagggaaaaccagaaataccgggtatatgtcgtgataccacttctgccagggttcgaaggagacatttcaaccggcggaggaaatgctctacaggcaatcatgcacttcaactacagaaccatgtgcagaggagaaaattccatccttggacagttaaaagcagagcttggtaatcagtggataaattacatatcattctgtggtcttagaacacatgcagagctcgaaggaaacctagtaactgagcttatctatgtccacagcaagttgttaattgctgatgataacactgttattattggctctgccaacataaatgaccgcagcatgctgggaaagcgtgacagtgaaatggctgtcattgtgcaagatacagagactgttccttcagtaatggatggaaaagagtaccaagctggccggtttgcccgaggacttcggctacagtgctttagggttgtccttggctatcttgatgacccaagtgaggacattcaggatccagtgagtgacaaattcttcaaggaggtgtgggtttcaacagcagctcgaaatgctacaatttatgacaaggttttccggtgccttcccaatgatgaagtacacaatttaattcagctgagagactttataaacaagcccgtattagctaaggaagatcccattcgagctgaggaggaactgaagaagatccgtggatttttggtgcaattccccttttatttcttgtctgaagaaagcctactgccttctgttgggaccaaagaggccatagtgcccatggaggtttggacttaagagatattcattggcagctcaaagacttccaccctggagaccacactgcacacagtgacttcctggggatgtcatagccaaagccaggcctgacgcattctcgtatccaacccaaggaccttttggaatgactggggagggctgcagtcacattgatgtaaggactgtaaacatcagcaagactttataattccttctgcctaacttgtaaaaagggggctgcattcttgttggtagcatgtactctgttgagtaaaacacatattcaaattccgctcgtgccgaattc

SEQ ID NO: 359 - DNA, 60 bp, Homo sapiens
cattgatgtaaggactgtaaacatcagcaagactttataattccttctgcctaacttgta

SEQ ID NO: 360 - DNA, 1793 bp, Homo sapiens
ccggaagtggtcggcgcgcggcgcggcgcgcctgggcgctaagatggcggcggcgtgagttgcatgttgtgtgaggatcccggggccgccgcgtcgctcgggccccgccatggccgtcaccatcacgctcaaaacgctgcagcagcagaccttcaagatccgcatggagcctgacgagacggtgaaggtgctaaaggagaagatagaagctgagaagggtcgtgatgccttccccgtggctggacagaaactcatctatgccggcaagatcttgagtgacgatgtccctatcagggactatcgcatcgatgagaagaactttgtggtcgtcatggtgaccaagaccaaagccggccagggtacctcagcacccccagaggcctcacccacagctgccccagagtcctctacatccttcccgcctgcccccacctcaggcatgtcccatcccccacctgccgccagagaggacaagagcccatcagaggaatccgcccccacgacgtccccagagtctgtgtcaggctctgttccctcttcaggtagcagcgggcgagaggaagacgcggcctccacgctagtgacgggctctgagtatgagacgatgctgacggagatcatgtccatgggctatgagcgagagcgggtcgtggccgccctgagagccagctacaacaacccccaccgagccgtggagtatctgctcacgggaattcctgggagccccgagccggaacacggttctgtccaggagagccaggtatcggagcagccggccacggaagcagcaggagagaaccccctggagttcctgcgggaccagccccagttccagaacatgcggcaggtgattcagcagaaccctgcgctgctgcccgccctgctccagcagctgggccaggagaaccctcagcttttacagcaaatcagccggcaccaggagcagttcatccagatgctgaacgagccccctggggagctggcggacatctcagatgtggagggggaggtgggcgccataggagaggaggccccgcagatgaactacatccaggtgacgccgcaggagaaagaagctatagagaggttgaaggccctgggcttcccagagagcctggtcatccaggcctatttcgcgtgtgaaaaaaatgagaacttggctgccaacttcctcctgagtcagaactttgatgacgagtgatgccaggaagccaggccaccgaagcccccaccctacccttattccatgaaagttttataaaagaaaaaatatatatatattcatgtttatttaagaaatggaaaaaaaaatcaaaaatcttaaaaaaacaagcaaacagtccagcttcctgtcctcctaaagtggcccctgttcccatctcccgggccagacagctgtccccccgtcctcctccccagcccagcctgctcagagaagctggcaggactgggaggcgacagatgggcccctcttggcctctgtcccagctctctgcagccagacggaaaggcggctgcttgcctctccatcctccgaaaaacccctgaggacccccccccatcctcttctaggatgaggggaagctggagccccaactttgatcctccattggagtggcccaaatctttccatctagggcaagtcctgaaaggcccaaggccccctccccagtctggccttggcctccagcctggagaagggctaacatcagctcattgtcaaggccacccccaccccagaacagaaccgtgtctctgataaaggttttgaagtgaataaagttttaaaaact

SEQ ID NO: 361 - DNA, 60 bp, Homo sapiens
accccagaacagaaccgtgtctctgataaaggttttgaagtgaataaagttttaaaaact

SEQ ID NO: 362 - DNA, 1861 bp, Homo sapiens
attttattttattattattactttttttgagattgagtcttgctgtgtagcccaggctggagtgcagtggcacgacttggctcactgcaatctccgccccctgggttcaagcgattctcctacctcggcctcctgagtagctgggatcgcgggcgtgtgccaccacacccagctattttttttttttttgtagtgttagtagagacaggatttcaccatgttggccaggctggtcttgaactcctgacctcaggtgatccacctgcctcggcctcccagagagctgggatttagaagcgtgagccaccactcccggccaatatatttgtatttgtaagttcacatcattcaaaaatctttatatctggtttctacctatttgagacaatatcctatgaattggtttttaaattaaaagaacatcatattggggagaagattgctctgtaatgtttgttcaagaaagcagcaaactaggctgagtgcggcagctcacccttgcaatctcagcactctgggaggctgaggctggcggatcacttaaggccgggaattcgagaccaacctggccagcatggtgaaaccctgtccctactaaaaatacaaagattagccggatgtggtggcatgcacctgtggtcccagatagtcaggaggctgaggtgggagaattgctggaacctgggaggcggaggttgcagtgagccgagattgcactactgcactccagcaagtgcaatgagaccctgcctcaaaaataaataaataaagcagcaaactgattttttaagcaaaaaaaaagaaagaaagaaagaaagaaaaaggctgccagtatcatgtgaaatttagagccctacttctaaaataccgttgctgcataagattttaggaattcagatgcatcactaaatattttttttttaagtggtgcaagtatgaaaggaaagggctctgagccaggcgcagtggctcacacctgtaatccaagcacttagggaggctggggtggacagatcacttgaggtcaggagttcaagaccagcctggccaatgtggtgaaatcccatctctactaaaaatacaaaaattagccaggcgtggtggtgcacacctgtaatcccagctacacaggaagctgaggcaggagaatagcttaaacctgggaggcagaggttgcagtgagccgagatcccgccactgcactcctgagtggcagagtaagactccgtctaaaaaaaaaaaagggctgtagactggcctggtggctcatgcctgtaatcccagcagtttgggaggccgaagcggggcagatcgagaccagcctggccaacatggcgaaacctcatgcctaccaaaaatacaaaaaattagccagacgtggtggtgggcgcctgtaatcccagctactcgggaggttgaggcaggaaaatcgcttgaacccagaaggtggaggttgcagtgagccaagatcgtaccattgcattccagcctgggcaacagcgagactccatctaaaaaaaaaaaaaaaaaagccgagcgtgatgtcatgtgcccataaccccaactactcaggaggctgagacacgagaataacttgaacccaggagatggagattgcagtaagctgagatcacgccgctgcactccagcctgggagacagaggaagactgtttcaaaaaaaattaaagagctgataccttttgcagtgggaaattcttaaagttttaagccaagtgcctatttttaactgatcatagtgtgatgtccacagaggcacaatgtatattagtactttcttccatatttggtacataatgaatgcctttggtactcattttctgaatggtttgctctagtagg

SEQ ID NO: 363 - DNA, 60 bp, Homo sapiens
ggtacataatgaatgcctttggtactcattttctgaatggtttgctctagtaggaaagaa

SEQ ID NO: 364 - DNA, 1610 bp, Homo sapiens
gctttttgcaaatgttgaatcatggttctgtttctaagttggatcttttttgttttctccttgccaccctaatttgacatcaaattctctcttgtgcattgggccctgggtcattcaaacccaggtcacctcattccccttctctgttcacacctaatgtcttgaagagtaggtagcagcagtgtgggctgaacctaggccagcttgcttagcgggtcaccctgctgtgaagtcctggcaggtgttggtaatgtgtggaaatgcagtcagcaagtttgctggggagtttgataaaagtataaaacaaaacaaaaaaagcctcggtataattttgttccacgacttcttctgtagctttacaccagaaggaaggaatgggctacagcaggtagtggaggaagaggggggtgagcaggtgtattaaaatagcttacgggtaaggcctaaaaggtcacccctcggccccctctccaaaagaagggcatgggcacccccaggagaggatggccccaaaaaccttatttttatacatgagagtaaataaacatattttttttacaaaaataacttctgaatttatcagtgttttgccgttaaaaatattcctctatagtaaattatttattggaagatgacttttttaaagctgccgtttgccttggcttggtttcatacactgatttatttttctatgccaggcagtagagtctctctgcctctgaggagcaggctacccgcatcccactcagcccctccctacccctcaagatttgatgaaaattccaaccatgaggatgggtgcatcggggaagggtgagaaggagagcctgcctgctcagggatccaggctcgtagagtcactccctgcccgtctcccagagatgcttcaccagcacctgcctctgagacctcgctctctgttccagcaaccctggttggggggtcagacttgatacactttcaggttgggagtggacccaccccagggcctgctgaggacagagcagccaggccgtcctggctcactttgcagttggcactgggttggggaggaagagagctgatgagtgtggcttccctgagctggggtttccctgcttgtccagttgtgagctgtcctcggtgttaccgaggctgtgcctagagagtggagatttttgatgaaaggtgtgctcgctctctgcgttctatcttctctctcctccttgttcctgcaaaccacaagataaaggtagtggtgtgtctcgaccccatcagcctctcacccactcccagacacacacaagtcctcaaaagtttcagctccgtgtgtgagatgtgcaggttttttctagggggtagggggagactaaaatcgaatataacttaaaatgaaagtatactttttataatttttctttttaaaacttggtgaaattatttcagatacatattttagtgtcaaggcagattagttatttagccaccaaaaaaaagtattgtgtacaatttggggcctcaaatttgactctgcctcaaaaaaaagaaatatatcctatgcagagttacagtcacaaagttgtgtattttatgttacaataaagccttcctctggaagggaaaaaaaaaaa

SEQ ID NO: 365 - DNA, 60 bp, Homo sapiens
atcctatgcagagttacagtcacaaagttgtgtattttatgttacaataaagccttcctc

SEQ ID NO: 366 - DNA, 3042 bp, Homo sapiens
gcggctgtccgcggtgccggctgggggcggagaggcggcggtgggctccctggggtgtgtgagcccggtgatggagccgggcccgacagccgcgcagcggaggtgttcgttgccgccgtggctgccgctggggctgctgctgtggtcggggctggccctgggcgcgctccccttcggcagcagtccgcacagggtcttccacgacctcctgtcggagcagcagttgctggaggtggaggacttgtccctgtccctcctgcagggtggagggctggggcctctgtcgctgcccccggacctgccggatctggatcctgagtgccgggagctcctgctggacttcgccaacagcagcgcagagctgacagggtgtctggtgcgcagcgcccggcccgtgcgcctctgtcagacctgctaccccctcttccaacaggtcgtcagcaagatggacaacatcagccgagccgcggggaatacttcagagagtcagagttgtgccagaagtctcttaatggcagatagaatgcaaatagttgtgattctctcagaattttttaataccacatggcaggaggcaaattgtgcaaattgtttaacaaacaacagtgaagaattatcaaacagcacagtatatttccttaatctatttaatcacaccctgacctgctttgaacataaccttcaggggaatgcacatagtcttttacagacaaaaaattattcagaagtatgcaaaaactgccgtgaagcatacaaaactctgagtagtctgtacagtgaaatgcaaaaaatgaatgaacttgagaataaggctgaacctggaacacatttatgcattgatgtggaagatgcaatgaacatcactcgaaaactatggagtcgaactttcaactgttcagtcccttgcagtgacacagtgcctgtaattgctgtttctgtgttcattctctttctacctgttgtcttctaccttagtagctttcttcactcagagcaaaagaaacgcaaactcattctgcccaaacgtctcaagtccagtaccagttttgcaaatattcaggaaaattcaaactgagacctacaaaatggagaattgacatatcacgtgaatgaatggtggaagacacaacttggtttcagaaagaagataaactgtgatttgacaagtcaagctcttaagaaatacaaggacttcagatccatttttaaataagaattttcgatttttctttccttttccacttctttctaacagatttggatatttttaatttccaggcatagcaatgttatctattttaatgtgtatttgtcacaataacagaacatgcaagaacaatcattattttattttataggcatttgattactattctagacttctggtatcttcttactaacataaatatctcaagtagaaaagtttttgaaaactaacatttaaaaattaatcagttacagtaaagactttgaaaaagaaatgtacttgttaggaagtagcttaattaccccccattgcagtattattgttatatatatagttaatatgttgtacatcacaataatatataattcagtctctagtttccctagagtcatttttgaaaccactgattgcaaacctccctgacaatttttaaaagtagtaagccacattacatttatctttgtaaaaagatttatggtaactggtttcttacttgacttttataaatagtattttacatcttatttttgcctttatttcataagtaatttaaaaatcactggattgctttattatattcagggcaatatggattatttttataccaaggatttgcatcgtgaattacattaagttatttggcaatttataatttattactactttaaatcaaatgtagcattatcacactgtatttaaattgtcattttttaaaggaatattttcttcttaagatatatagaggattttggagaagagagacaggaggggtaaaaccagcttaaggttcagcgagcagaaagggacctgagaggatgctcactgtaagactgttggacagtggtgtgtattgaggggatgaatcggaacgatagtctcatgcagaaaatagtgagattaagatcatccttattgtttctaaattatttcaatcagatgaaagtgatacgattgaaatgaaatcacatagttcgtgctcagaaattctattttggtatgtttgtattagcctttagaaaaaacactccgtttcagaattgttcacagttttatttcttaggtttttagagttcaggatttcatttattaatttcttcttgcttttttggtggaaataggctttgttgtaaacattaagaatataaaatctcctctatatagaaacaagaattttgttaaaaagagaatttgaatcccttcctatactataaaatgctctatagggagacaaagtgtttcttttttcttttatgtttactgtttatgtggagtgaaatataaggctcttggatgtataacatactcaaaagctgttacactttctctgatctgctgtgatccactgaaaatgtgctggggtttgttctgctgtcactgtttatgctgctggaacttagcactgtcttgatttgaagcatatgattgagagccatttgaagcaatcttcattaatgcagataaaacaagtttacatgtgcagagttagaaaatgacatgttcaattctgtaagtggtgactttttgagcacctttcagtattatgtatttgtaaaaaccattgtttttggatataaagctaataagcactttaaaaaggaaaaggcagcctttactattttttctggttgagtcattgctctttagacctagcatcagcaatagatttcaaagataagtattaagcgctaccctaaagtgtgtaagtttttcattttgtcatattgaaaaatgatttgcatagtactgaatgttgacacacagcttatatgtatttacaagaatatctttaagtgtttttttgacacattaaaataaaggaaataaggaaattgtaa

SEQ ID NO: 367 - DNA, 60 bp, Homo sapiens
ctttagacctagcatcagcaatagatttcaaagataagtattaagcgctaccctaaagtg

SEQ ID NO: 368 - DNA, 1610 bp, Homo sapiens
ggcacgaggctgcggccgcagtagccggagccggagccgcagccaccggtgccttcctttcccgccgccgcccagccgccgtccggcctccctcgggcccgagcgcagaccaggctccagccgcgcggcgccggcagcctcgcgctccctctcgggtctctctcgggcctcgggcaccgcgtcctgtgggcggccgcctgcctgcccgcccgcccgcagccccttgcctgccggcccctgggcggcccgtgccatgggcaccgacagccgcgcggccaaggcgctcctggcgcgggcccgcaccctgcacctgcagacggggaacctgctgaactggggccgcctgcggaagaagtgcccgtccacgcacagcgaggagcttcatgattgtatccaaaaaaccttgaatgaatggagttcccaaatcaacccagatttggtcagggagtttccagatgtcttggaatgcactgtatctcatgcagtagaaaagataaatcctgatgaaagagaagaaatgaaagtttctgcaaaactgttcattgtagaatcaaactcttcatcatcaactagaagtgcagttgacatggcctgttcagtccttggagttgcacagctggattctgtgatcattgcttcacctcctattgaagatggagttaatctttccttggagcatttacagccttactgggaggaattagaaaacttagttcagagcaaaaagattgttgccataggtacctctgatctagacaaaacacagttggaacagctgtatcagtgggcacaggtaaaaccaaatagtaaccaagttaatcttgcctcctgctgtgtgatgccaccagatttgactgcatttgctaaacaatttgacatacagctgttgactcacaatgatccaaaagaactgctttctgaagcaagtttccaagaagctcttcaggaaagcattcctgacattcaagcgcacgagtgggtgccgctgtggctactgcggtattcggtcattgtgaaaagtagaggaattatcaaatcaaaaggctacattttacaagctaaaagaaggggttcttaactgacttaggagcataacttacctgtaatttccttcaatatgagagaaaattgagatgtgtaaaatctagttactgcctgtaaatggtgtcattgaggcagatattctttcgtcatatttgacagtatgttgtctgtcaagttttaaatacttatcttgcctccatatcaatccattctcatgaacctctgtattgctttccttaaactattgttttctaattgaaattgtctataaagaaaatacttgcaatatatttttcctttatttttatgactaatataaatcaagaaaatttgttgttagatatattttggcctaggtatcagggtaatgtatatacatattttttatttccaaaaaaaattcattaattgcttcttaactcttattataaccaagcaatttaattacaattgttaaaactgaaatactggaagaagatatttttcctgtcattgatgagatatatcagagtaactggagtagctgggatttactagtagtgtaaataaaattcactcttcaatac

SEQ ID NO: 369 - DNA, 60 bp, Homo sapiens
ctgacttaggagcataacttacctgtaatttccttcaatatgagagaaaattgagatgtg

SEQ ID NO: 370 - DNA, 1867 bp, Homo sapiens
gcgggccgccgtacgcccggggctgcggctctcccgcgtgggccgcggccgctcggctccgcgggcagccgcgccgtcctgccccgcgcgcgcgctagccgctgtcggccgcaggagccccgggaatctggaggggccgtggggcggagggaggggcctgcgggcggaaggcggacgaaaacagaacggaagacgacaaggaggagccggaagatgcggacgagaacgccgaggaggagctgctgcggggagagcctctgctgccggcggggacccagcgcgtgtgtctggttcaccctgacgtcaagtggggcccggggaagtcgcagatgactcgagccgagtggcaggtggcggaggccacagcgctggtgcacacgctggacggctggtccgtggtgcagacaatggtcgtgtccaccaaaacgccggacaggaagctcatctttggcaaagggaactttgagcacctgacagaaaagatccgagggtctccagacgtcacgtgcgtcttcctgaacgtggagaggatggctgccccgaccaagaaagaactggaagccgcctggggcgtggaggtgtttgaccgcttcacggtcgtcctgcacatcttccgctgtaacgcccgcacgaaggaggcccggcttcaggtggccctggcggagatgccgctgcacaggtcgaacttgaaaagggacgtcgcccacctgtaccgaggagtcggctcgcgctacatcatggggtcaggagaatccttcatgcagctgcagcagcgtctcctgagagagaaggaggccaagatcaggaaggccttggacaggcttcgcaagaagaggcacctgctccgccggcagcggacgaggcgggagttccccgtgatctccgtggtggggtacaccaactgcggaaagaccacgctgatcaaggcactgacgggcgatgccgccatccagccacgggaccagctgtttgccacgctggacgtcacggcccacgcgggcacgctgccctcacgcatgaccgtcctgtacgtggacaccatcggcttcctctcccagctgccgcacggcctcatcgagtccttctccgccaccctggaagacgtggcccactcggatctcatcttgcacgtgagggacgtcagccaccccgaggcggagctccagaaatgcagcgttctgtccacgctgcgtggcctgcagctgcccgccccgctcctggactccatggtggaggttcacaacaaggtggacctcgtgcccgggtacagccccacggaaccgaacgtcgtgcccgtgtctgccctgcggggccacgggctccaggagctgaaagctgagctcgatgcggcggttttgaaggcgacggggagacagatcctcactctccgtgtgaggctcgcaggggcgcagctcagctggctgtataaggaggccacagttcaggaggtggacgtgatccctgaggacggggcggccgacgtgagggtcatcatcagcaactcagcctacggcaaattccggaagctctttccaggatgaacggacgcccacagaggcctgcggggtgggggcatcgctgcctggggagctgaggcgttaccgctgtgttgggggcagcttggtgtcaggtgcagcagggtcctccttgtctggttctgcacccgtctcgctcccagccatttgctgggatgaccgtgcaggccggtgacacggccgcacctgccccaaagcgggccgcccgagcgtccactccaagcctgagcatccacacaattccagtgggccctcggtgcctgctgtgaactgctttccctcggaatgtttccgtaacaggacattaaacctttgattttaaaaaaaaaaaa

SEQ ID NO: 371 - DNA, 60 bp, Homo sapiens
tgaactgctttccctcggaatgtttccgtaacaggacattaaacctttgattttaaaaaa

SEQ ID NO: 372 - DNA, 3308 bp, Homo sapiens
ctacttccgagggggtgagtggcttcaccgccggtcccttgcagcgctgcctttcgatctctccacatctcggtggcgcgggatctcaagatgcgcctccacctgctcctgctgctcgcgctgtgcggtgcaggcaccaccgccgcggagctcagttacagcttgcgtggcaactggagcatctgcaatgggaacggctcgctggagctgcccggggcggtccctggctgcgtgcacagcgccttgttccagcagggcctgatccaggattcttactacagatttaatgaccttaactacagatgggtctctttggataactggacctatagcaaagaatttaaaatcccctttgaaattagcaaatggcaaaaagtaaatttgattcttgagggagtggatacggtttcaaaaatcctgttcaatgaagtcactattggggaaacagacaatatgttcaatagatatagctttgatattaccaacgtggtcagggacgtgaactccattgagctgcgtttccagtcagcggtgttgtatgcagcacagcagagcaaagctcacactcgctaccaggttcccccagactgccctccacttgtgcagaagggtgaatgccatgtcaactttgttcggaaggagcaatgttcctttagttgggactgggggccttcctttcctacccagggaatctggaaagatgttagaattgaagcctataatatttgtcacctgaactacttcacattttccccaatatatggtaagagtgcccaggagtggaatctggaaatagagtctacatttgatgttgtcagctcaaagccagttggtggtcaagtgatcgtagccatccctaagttgcaaacacaacagacatacagcattgaacttcaacctgggaaaaggattgttgagctatttgtgaacattagcaagaatattactgtagaaacttggtggcctcatggacatggaaaccagactgggtacaacatgactgttctttttgaactggatggaggcttaaatattgaaaaatcagctaaggtttattttaggacagtggaacttatagaagagcctataaaagggtctcctggtttgagtttctatttcaaaattaatggatttcccatatttctaaaaggctcaaactggatcccagcagattcattccaggaccgagtaacctctgagttgttacggctccttttacagtctgttgtggatgctaatatgaatactcttcgggtttggggaggaggaatttatgagcaggatgaattctatgaactctgtgatgaactaggaataatggtatggcaggattttatgtttgcctgtgccctttatccaactgatcagggcttcctggattcagtgacagcagaagttgcctaccagatcaagagactgaaatctcatccttctatcatcatatggagtggcaataatgaaaatgaggaggcgctgatgatgaattggtatcatatcagtttcactgaccggccaatctacatcaaggactatgtgacactctatgtgaaaaacatcagagagctcgtactggcaggagacaagagtcgtccttttattacgtccagtcctacaaatggggctgaaactgttgcagaagcctgggtctctcaaaaccctaatagcaattattttggtgatgtacatttttatgactatatcagtgattgctggaactggaaagttttcccaaaagctcgatttgcatctgaatatggatatcagtcctggccgtccttcagtacattagaaaaggtctcgtctacagaggactggtctttcaatagcaagttttcacttcatcgacaacatcacgaaggtggtaacaaacaaatgctttatcaggctggacttcatttcaaactcccccaaagcacagatccattacgcacatttaaagataccatctaccttactcaggtgatgcaggcccagtgtgtcaaaacagaaactgaattctaccgccgtagtcgcagcgagatagtggatcagcaagggcacacgatgggggcactttattggcagttgaatgacatctggcaagctccttcctgggcttctcttgagtacggaggaaagtggaaaatgcttcattactttgctcagaatttctttgctccactgttgccagtaggctttgagaatgaaaacacgttctatatctatggtgtgtcagatcttcactcggattattcgatgacactcagtgtgagagtccatacatggagctccctggagcccgtgtgctctcgtgtgactgaacgttttgtgatgaaaggaggagaggctgtctgcctttatgaggagccagtgtctgaattgctgaggagatgtgggaattgcacacgggaaagctgtgtggtttccttttacctttcagctgaccatgaactcctgagcccgaccaactaccacttcttgtcctcaccgaaggaggccgtggggctctgcaaggcgcagatcactgccatcatctctcagcaaggtgacatatttgtttttgacctggagacctcagctgtcgctccctttgtttggttggatgtaggaagcatcccagggagatttagtgacaatggtttcctcatgactgagaagacacgaactatattattttacccttgggagcccaccagcaagaatgagttggagcaatcttttcatgtgacctccttaacagatatttactgaaggaatctaggttgtattttcagtggacaatgggaataaagcatttctaaagcaccgactggagaggaaggcaacagagacaaggagagaagccgagagacatgtctgcgtgctgccacgcatttgagcgattgctctgtgaagagttgtacactgaacactttcaggggaggctgtttacccaggcaatgtcctcaaacaagcctgtgccggggtgtcctggaatctgtgccaggactgtgtttttagcccttcacctctcagctttagcaggacatgaaccagttataacaagatggccctgcagctggttacaagaatgtgacatggcaggatctatggaaccaaatggaaggttttgaggtgatgtaggtctttcacagctagctttggggaatacggaatactcaaataaagtgctttgttattatttcagagggaatggcgattgaaatgttacaacagagatttcttggtggtagctatttgggtaaaggtatatgggtatttttctgtacatgtgaaattatataaaaataaaagttatataaattacattgacaactaaaaaaaaaaaa

SEQ ID NO: 373 - DNA, 60 bp, Homo sapiens
tggcgattgaaatgttacaacagagatttcttggtggtagctatttgggtaaaggtatat

SEQ ID NO: 374 - DNA, 2205 bp, Homo sapiens
gaagggcctggggaagccaggtggccagggagatgccatccagctaagccctaagctccaggctctggctgaggaacccagccagcctcatactcggagcccggccaaaaacaagaagacgctggggaggaaacgtgggcacaagggttccttcaaggacgacccccagctctaccaggagatccaggagcggggcctgaacaccagccaggagtctgatgacgacatcctcgatgagtcctccagccccgagggaacccagaaggtggacgccaccattgtggtcaagagctaccggcccgcccaggtcacctggagccagctcccggaggtggtggaattgggcatcctggaccagctctccactgaggagcggaaaaggcaggaggccatgttcgagatcctcacgtcggagttctcctaccagcacagcctgagcatcctggtggaggagttcctgcagtccaaggagctgcgggcgaccgtgacccagatggagcaccaccacctcttctccaacatcctggatgtcctgggtgccagtcagaggttcttcgaggacctggagcagcggcacaaggcccaggtgctggtcgaggacatcagtgacatcctggaggagcacgctgagaagtacttccacccctacatcgcctactgctccaacgaggtctaccaacagcgcacgctgcagaagctgataagcagcaacgccgccttccgagaggccctgagagagattgagaggcggccggcgtgcgggggcctgcccatgctctccttcctgatcctccccatgcagcgggtgacccggctgcccctcctgatggatacgctctgcctcaagacccagggccactccgaaaggtacaaggctgccagccgtgcactgaaggccatcagcaagctggtgaggcagtgcaacgagggggcccacaggatggagcgcatggagcagatgtacacgctgcacacacagctggacttcagcaaggtcaagtccctcccactgatctccgcctcccggtggctgctgaagcgcggagagctgttcttagtggaagaaaccggactttttcgaaaaattgccagccggccaacgtgctaccttttcctgttcaacgatgtcctggttgtgaccaagaagaagagcgaggagagctacatggtccaggactacgcccagatgaaccacatccaggtagagaagatagagccgtctgagctccctctgcccgggggcggcaaccgtagctcctccgtgccccaccccttccaggtgaccctgcttcgcaacagcgagggccgccaggagcagctcctgctctcctcggactccgcgagtgaccgggcacggtggatcgtggcgctcacacacagtgagagacagtggcagggcctctccagcaaaggagacctgccccaggtggagatcaccaaggccttcttcgcgaagcaagcagacgaggtcacactgcagcaggcggacgtggtcctggttctgcagcaggaggatgggtggctctatggcgagaggctccgggacggagagacgggatggttccccgaggactttgcccgcttcatcaccagccgtgtggccgtggagggcaatgtccgcaggatggagcgtctgcgggtggagacggacgtgtagccctggcgaggccagccggcggcagcacagcctgtccccaatcagcaagtggtcgtgcctggctctagagagcgtggggagctggtctcaaggacccagcatggttccctggggcttcccaagagcctgtggctgtggtgccgggctccagacacttcacggaaggaagatcacatgtccccagagaggcacccccaggcaagctcgagggggccacaccgtgtcccagggagcccagcctattcccgttggctggctgggcccctctcagctgctgggccccacctccccactgcacccaggggacaactccacctggactgatgggcacaggaggcaccaatagcgattattgggggcaatgcgaggtctcctcctatgcccttcctacccctgagtgggacaagaagggccttgagtgcccaggagtgccccacgttctgagaaggggccggccggagggaggggacccggcagggagatttcggttttgaggtttctaaatacattaaagttatttcttaagaaaaaaaaaaaaaaaaaaaaaa

SEQ ID NO: 375 - DNA, 60 bp, Homo sapiens
ggacccggcagggagatttcggttttgaggtttctaaatacattaaagttatttcttaag

SEQ ID NO: 376 - DNA, 1963 bp, Homo sapiens
gtgttgtacgaaagcgcgtctgcggccgcaatgtctgctgagagttgtagttctgtgccctatcacggccactcccatttctggtgccgtcacgggacagagcagtcggtgacaggacagagcagtcggtgacgggacacagtggttggtgacgggacagagcggtcggtgacagcctcaagggcttcagcaccgcgcccatggcagagccagacccctctcaccctctggagacccaggcagggaaggtgcaggaggctcaggactcagattcagactctgagggaggagccgctggtggagaagcagacatggacttcctgcggaacttattctcccagacgctcagcctgggcagccagaaggagcgtctgctggacgagctgaccttggaaggggtggcccggtacatgcagagcgaacgctgtcgcagagtcatctgtttggtgggagctggaatctccacatccgcaggcatccccgactttcgctctccatccaccggcctctatgacaacctagagaagtaccatcttccctacccagaggccatctttgagatcagctatttcaagaaacatccggaacccttcttcgccctcgccaaggaactctatcctgggcagttcaagccaaccatctgtcactacttcatgcgcctgctgaaggacaaggggctactcctgcgctgctacacgcagaacatagataccctggagcgaatagccgggctggaacaggaggacttggtggaggcgcacggcaccttctacacatcacactgcgtcagcgccagctgccggcacgaatacccgctaagctggatgaaagagaagatcttctctgaggtgacgcccaagtgtgaagactgtcagagcctggtgaagcctgatatcgtcttttttggtgagagcctcccagcgcgtttcttctcctgtatgcagtcagacttcctgaaggtggacctcctcctggtcatgggtacctccttgcaggtgcagccctttgcctccctcatcagcaaggcacccctctccacccctcgcctgctcatcaacaaggagaaagctggccagtcggaccctttcctggggatgattatgggcctcggaggaggcatggactttgactccaagaaggcctacagggacgtggcctggctgggtgaatgcgaccagggctgcctggcccttgctgagctccttggatggaagaaggagctggaggaccttgtccggagggagcacgccagcatagatgcccagtcgggggcgggggtccccaaccccagcacttcagcttcccccaagaagtccccgccacctgccaaggacgaggccaggacaacagagagggagaaaccccagtgacagctgcatctcccaggcgggatgccgagctcctcagggacagctgagccccaaccgggcctggccccctcttaaccagcagttcttgtctggggagctcagaacatcccccaatctcttacagctccctccccaaaactggggtcccagcaaccctggcccccaaccccagcaaatctctaacacctcctagaggccaaggcttaaacaggcatctctaccagccccactgtctctaaccactcctgggctaaggagtaacctccctcatctctaactgcccccacggggccagggctaccccagaacttttaactcttccaggacagggagcttcgggcccccactctgtctcctgcccccgggggcctgtggctaagtaaaccatacctaacctaccccagtgtgggtgtgggcctctgaatataacccacacccagcgtagggggagtctgagccgggagggctcccgagtctctgccttcagctcccaaagtgggtggtgggcccccttcacgtgggacccacttcccatgctggatgggcagaagacattgcttattggagacaaattaaaaacaaaaacaactaac

SEQ ID NO: 377 - DNA, 60 bp, Homo sapiens
atgctggatgggcagaagacattgcttattggagacaaattaaaaacaaaaacaactaac

SEQ ID NO: 378 - DNA, 2048 bp, Homo sapiens
tataagagtacttccccagttttgaggctggacagttaatatactttatatcaattatacatttaatataatttaatttaaaataatttaaagattcttaggagatagtctgactttcctgacctagatgggaatgatcagatagggattttttttgtggcacaggctaaatttgatggtgacatttatattgttgagaatgttacatcttattttaccacaacttttaaaaaatgttacatcttttgcagtaggatcagttgtgaggcacatagtagctgaggctccatggagccacctttcatttctttcagtcagagaggaggacagtctctgtctctgcatttctggtgtcttgcttgtcggtggcagagccatgcttgccggcatttgcttaggcggccatagtagttgctaagtgtacaggtgactgggcagggatgggaggtggccacaggtcagagacaagtgctcagtcagtccctggtgccaggactgtgtgcctcggtgccttgggaaatggaagctccctggtgcagctgcagctgtgggtggaggtagagaagccagcaagaccttggtcttaaccccgtgttcattttcttgctagctgtgtgacgttgggctacctcgcttctctgagtacaaatggtgtgtggtgaatgggtcccaggtatgctacgagctttgagggctgctctttttctcttcatagcgataagtgttaaactgtctttcttaggaaacgttcacagacttgcaacagctgatgtcctctgagtactgtctgactccctcaggcaagttcctgaattcagtaccatcattattatttttgtgtaagactttgacaaagtatagcccctgccaccagagcagcctgtacagtgggtctctaaggtgggacctgccccgggcctgccatgcacgtgtgtgaaacagcgtgaaaagtgtcgcggtaaggtgaccctgggttacccaggcaaggctcggtgtttgtttcagaaagcagagaagtatgtaattgattttaaaagtttctgtttaaaatatttggctatgttttagactatgaaggaatgaactttgcttctctggataagaaagtcacatacattgttccagctccaagtttgttcggccctcgccacaagtggatgtagcgtttggccctttgtgtgccttgctggtgactctggttttgggagctcggatatgtcccagaagcaggcttatggcacttctgtagctcccttgctacccttcctttgtgtctagataagtgactgacatgcttttctttggtctcaggaaagtgggggctcagcaagaactgattaccgagccattcaactagccaaggaaaaaaagcagagaggagcggggagcaatgcaggtgaggccgtgtgtgctgcagccggacgagcaagggcctgagggttctctgtcactgttactggcagaagaaacacagcaggtgtttctgtgctcttggttttacttttctgttcagaatacccttttatcaactccttagttttatttgaacttaagggaaaaaattagtaacaaaattcccagcatcagtatgaacatattttatttgcctaaacaagctttgtgaaagttaagcgttcaaacaccagtgtcagttacctggaaggctactaaggtaaataagcaaagcaggccagttgtcaggaaagcagagattgtgcctggtgctgaatggccttggggcctgatcttggcatggcagagacctggggactgccactgtccccaggtacgtgtacatggagccaaactgtgtgtcctgtggcattgtcagagttatgttgaaatcttatttgaaaatgttagcaacttacttgcatttttaaagaccaaacaagagctggtaacctatggcctcaagcatctgtccttcctaaaaatggaatagtgggatgtagtgcttaatggaaactgctaaatctttttctaaaaactaacagtggatttttaaaatatattgttttttgtgtaaaaaaaaaaaaaaaaaaaaa

SEQ ID NO: 379 - DNA, 60 bp, Homo sapiens
ctgtccttcctaaaaatggaatagtgggatgtagtgcttaatggaaactgctaaatcttt

SEQ ID NO: 380 - DNA, 2773 bp, Homo sapiens
atgtgatgcatgctcacgtgtctccgcagccggctcgggaaagaatcccccaagctccatttcatgagtaagcgtgagagccgctcagtttcctccagctctgctgaagccagcacagaagtagcccaaactcttccctctgctgacagcaaattttaggcaaagtcttgagaaagaagaaattgggtccagaaagggaagtgaggagaatcagatcccagacctttggggagaaggagcaaccgcctctggcacagcccatcagggagaaagagcaggttgagaagagtcctaagctaacagccccaaacaggtgggtgttgctcagctccctgaggcatgtggttgtaaggcagaacccacagaccttgcaggaagaaggctctcggggccatggcccaggtcagcatcaacaatgactacagcgagtgggacttgagcacggatgccggggagcgggctcggctgctgcagagtccctgtgtggacacagcccccaagagtgagtgggaagcctctcctgggggtctggacagaggcaccacttccacacttggggccatcttcatcgtcgtcaacgcgtgcctgggtgcagggttactcaacttcccagcagccttcagcactgcggggggcgtggcagcaggcatcgcactgcagatgggtatgctggttttcatcatcagtggccttgtcatcctggcctactgctcccaggccagcaatgagaggacctaccaggaggtggtatgggctgtgtgtggcaagctgacaggtgtgctatgtgaggtggccatcgctgtctacacctttggcacctgcattgccttcctaatcatcattggcgaccagcaggacaagattatagctgtgatggcgaaagagccggagggggccagcggcccttggtacacagaccgcaagttcaccatcagcctcactgccttcctcttcatcctgcccctctccatccccagggagattggtttccagaaatatgccagcttcctgagcgtcgtgggtacctggtacgtcacagccatcgttatcatcaagtacatctggccagataaagagatgaccccagggaacatcctgaccaggccggcttcctggatggctgtgttcaatgccatgcccaccatctgcttcggatttcagtgccacgtcagcagtgtgcccgtcttcaacagcatgcagcagcctgaagtgaagacctggggtggagtggtgacagctgccatggtcatagccctcgctgtctacatggggacaggcatctgtggcttcctgacctttggagctgctgtggatcctgacgtgctcctgtcctatccctcggaggacatggccgtggccgttgcccgagccttcatcatcctgagcgtgctcacctcctaccctatcctgcacttctgtgggcgggcggtggtggaaggcctgtggctgcgctaccagggggtgccagtggaggaggacgtggggcgggagcggcggcggcgagtgctgcagacgctggtctggttcctgctcaccctgctgctggcgctcttcatccctgacatcggcaaggtgatctcagtcattggaggcctggccgcctgcttcatcttcgtcttcccagggctgtgcctcattcaagccaaactctctgagatggaagaggtcaaaccagccagctggtgggtgctggtcagctacggagtcctcttggtcaccctgggagccttcatcttcggccagaccacagccaacgccatctttgtggatctcttggcataaccactgcctcccagggaacacaaggcctttgccattggtcgcaggaacccatctcttagagctatggggccattcttagtccacgatcattccaactggtgggatgacatccggacatcctcttccagggactggggcaaactcaggccccacacctctggacagctcaaatccagtccccttcctgctccccagtcctggcagtgccgtggatggcggcaggaagtctcacatcatagaggacccctcctcctctcccagttctcaacttctccatgcctggaatccacgggtgaagagagtcggtagatctcataagaaagaatccagtctgacttccctctggagaatgactatggacagaaggccaccatcctccacagagcaccctgtcctgagtaggggttgtgctcattaccccaggccagtggtagcttcctcaggagcctggccacttccaaaggtagcactgaagtcgtgcaaatacatagtcaggtagattcagaccttgtccacaccttcctgggcaacccccaccatgaacctgtcagcctctttcccatagctaatagacatttcccaggccttgaggggccccaccctgtctctttcatcaaacctgatggtccaggctgggcatccctctcctcctccatccccagacatcaccaggtctaatgtttacaaacggtgccagcccggctctgaagccaagggccgtcccgtgccacggtgctgtgagtattcctccgttagctttccccataaggttgggagtatctgcttttgtgtctgagatgggcccctcttttcagaggccgcagggtgggtgatggagaaggctgagaacctttcagaccctctgtgtgggctgggctggtcagaatcagggtgtacctccccgacaccttctttttcagtgatgttttctcttctccctgcctttcctctgcctcctcccctgccagccctagcgtgactacccagagac

SEQ ID NO: 381 - DNA, 60 bp, Homo sapiens
cactgtttcttttctacttgtgtatactcgagaaagggaagatggttaataaaagggatt

SEQ ID NO: 382 - DNA, 5086 bp, Homo sapiens
gcctgcgccgcgcagcccgcctcgggcgggaggcgggaggcgggaggccgggcccaggccggggcagcccctccaccgcaccgtcctgggccggtgcccaggtccgagtcgccttccgcctgccccccccgccaatcccccgccgcggcagccccagccaggtcccgccgccaggccggctcccgcccccgctccgcccccggagccgcagccccgcccgccatcgccgtcgccatgttgtggctcccgcagccggcgctggggacgcgcgcggccgagactctggcctgcagtcgccgccgccgccgccaggtggtgtttggactctagaccatgtgcctaggtagaagtttttcctttctccgcagctctgctcccctagcaacgctcgccacacccttgttttgagatcctctctaaggagcggagagtttaataggcaagaaggaagggagaagacagaaggaagacgctcccccgtacggagacagagggagggggggctccaaagccgaaagaggaggtccctacctgccacggataccagtcagcccttgccagcatccagccatgggggatatgaaaaccccagattttgatgaccttctggctgcctttgacatcccagaccccaccagccttgatgccaaggaggccatccagacacccagtgaggagaatgagagtcccctcaaacctccaggcatatgtatggatgaaagtgtgtccttgtctcactcaggatcagcccccgatgtgccggccgtgagtgtcattgtcaagaacaccagccgccaggagtcatttgaagcggagaaagaccacattactcccagtctcctacacaatggattccggggctcagatctgcctccagatccccacaactgtgggaaatttgattctacttttatgaatggagacagtgccaggagtttccctggcaaactggagcctcccaagtcagagccattacccaccttcaaccagttcagtccaatctccagcccagaacctgaggatcccatcaaagataacggatttgggataaagcccaaacactctgacagttatttcccaccccctcttgggtgcggggctgtgggaggcccagtcctggaggctctggctaagtttccggttccagagctgcatatgtttgatcatttttgtaagaaagaacccaagccagaacccctgcccttggggagccagcaggaacacgagcaaagtgggcagaacacagtggaacctcacaaggatccggatgccactcgattcttcggggaagctttggagttcaacagccatcctagcaacagtattggagagtccaaggggcttgcccgggagcttggtacctgctcatcagtcccccctaggcagcgtctaaagccagctcattccaagctgtcctcttgtgtggcagccttggtggccttgcaggccaaaagagtggctagtgtcactaaggaggatcagcctggccacacaaaggatctctcagggcccactaaagagagttctaaaggtagccccaaaatgcccaagtcaccaaagagtccccggagccctctggaggccactagaaaaagtatcaagccatcggacagccctcgtagcatctgcagtgacagcagcagcaaaggctcaccgtctgtggctgccagctccccaccagcaattcccaaagtgagaatcaaaaccattaagacatcatcaggggaaatcaaacggactgtcacaaggatcctgccagatcctgatgatccaagtaagtcccctgttgggtcacctctagggagcgccattgcagaggcccccagcgagatgccaggggatgaggtgcctgtggaagagcactttcctgaggcaggcacaaattcagggagcccccagggggccaggaaaggggacgagagcatgacaaaggccagtgactcgtcatctcccagctgcagttctgggccccgggtcccaaagggggctgccccaggctcacagacaggcaagaagcaacagagcacagcactgcaggcatccaccctggcccctgccaacctcctgcccaaagccgtgcacttggccaacctgaacctcgtcccccacagtgttgctgcatcagtgacagccaagtcttcagtgcaaagacggagccagccacagcttacacaaatgtcggtgcccctggtccaccaggtgaaaaaggctgccccactgattgtagaggtcttcaacaaggtccttcacagctccaaccccgtgcccctctatgcgccaaatctcagcccgcctgcggacagcaggatccacgtgccggccagtgggtactgctgcctggagtgtggagacgcatttgccttagagaagagcctgagccagcactatggccggcggagcgtccacattgaggtactgtgcacactgtgctccaagacgctgctcttcttcaacaagtgcagcctgctccggcacgcccgtgaccacaagagcaaggggctcgtcatgcagtgttcccagctgctggtgaagcctatctctgcggaccaaatgttcgtgtcggcccctgtgaactccacggcaccagcagccccagccccttcatcctctcccaaacatggcctcacttcgggcagtgccagtccccctcctccagccttgccactctacccagaccctgtgaggctcatccggtactcaatcaagtgtcttgaatgtcacaagcagatgcgggactacatggtcctggctgcacatttccagaggacaacagaggagacagaggggctgacctgccaggtatgccagatgctgctgcccaaccagtgcagtttctgtgcccaccagcggattcatgcacacaagtccccctactgctgcccggagtgtggggtcctctgccgctctgcctacttccagacccatgtaaaggagaattgcctgcactatgcccgcaaggtgggctacaggtgcatccactgtggtgtcgtccacctgaccttggccttgctgaaaagccacatccaggagcgacactgccaggttttccacaaatgtgcattctgccccatggccttcaagactgccagcagcactgcagaccacagtgccacccagcaccccacccagccccacagaccctcccagctcatttataagtgctcctgtgaaatggtcttcaacaagaagaggcacattcagcagcatttttaccagaatgtcagcaagacgcaggtgggcgtcttcaagtgccctgagtgcccactcttgttcgtgcagaagccggagttgatgcaacacgtcaagagcacccacggtgttccccgaaatgtggacgagctgtcaaacctccagtcttcagcggacacatcctcaagccgccctggctctcgagttcccactgagccaccagccactagtgtggctgctcggagcagctccctgccttctggccgctggggtaggcctgaagcccaccgcagggtggaagccaggccgcggctgaggaacactggctggacctgccaggagtgccaggagtgggttccagatcgggagagctacgtgtcccacatgaaaaagagccacggtcggacattgaagcggtacccatgccggcagtgtgaacagtccttccacacccccaacagcctgcgcaaacacatccgcaacaaccatgacacagtaaagaagttctacacctgcgggtactgcacagaggacagccccagctttcctcggccctcccttctggagagccacatcagccttatgcatggcatcagaaaccctgatttgagccagacgtccaaagtgaaacctccgggtggacattcccctcaggtgaaccatctgaaaagaccagtcagtggagtgggggacgctccaggcaccagcaatggcgcaactgtctcttccaccaaaaggcacaagtccctttttcagtgcgcgaaatgtagttttgccacagactcggggctcgagtttcagagccacatacctcagcaccaggtggacagctccacagcccaatgtctcctctgtggtttgtgctacacctctgccagctccctcagccgccacctcttcattgtccacaaggtgagagaccaggaggaggaggaggaagaggaggcggcggcagcggagatggcagtggaggtggcagagccagaggagggctccggggaggaggtgcccatggagactagagagaatggactggaagaatgtgccggtgagcctttgtcagctgacccagaggcgaggagattgctgggcccggcccctgaggacgatggtggccacaatgatcacagtcaaccacaggcctctcaggaccaggacagccacacactgtcccctcaggtgtgaccggagactttgcagtgtgcatggtcaggggtggtgccgaagtgtcttccacctgccctgcggaccgtggaaaataaaaggctctgcccccagtgtgagtgtgaccggttgtaccctggagtagtgtctgccctgagctgccagtgctgggtatcccccagccccaggaaatgtggggtcggccaggaccctcacagctctgaatttgcttctgttatttatggcttttcgctgcttcttggtgccccatctcttgtctgtgtccttccaaccccaagctgcttatgtggcccaaccccactgctgtcaactaggcttgaaccccacagcggctgtgctcttctgggaggttcccgcttgctgccttcagccagggcgctcctcagagctctattttcctgcagacaccagctctccttcctgcctttagatcctgagaaggagggaaatgaggggtgctgacacagtccctctgggagagctctgcctagtctggtttggcgagggcccttgatcaccttgcccctcctccctgtcttctctgattcttttccctcaaaatagtcctgagaactaattgtcacagacattggaatatttgtactgctctcgtgccatttgagaggctgctgccccaggcaggccagcccctactcctcttggctacactcatgttgctcagactatatttcaaataaaaaatcttctcacc

SEQ ID NO: 383 - DNA, 60 bp, Homo sapiens
ctgagaactaattgtcacagacattggaatatttgtactgctctcgtgccatttgagagg

SEQ ID NO: 384 - DNA, 2821 bp, Homo sapiens
gttcagccagcagcagcagcagctccagcaacagcagcagcagctccagcagttacagcagcagcagctccagcagcagcaattgcagcagcagcagtcactgcagctccagcagctgctccagcagtccccaccacaggccccgttgcccatggctgtcagccgggggctccccccgcagcagccacagcagccgcttctgaatctccagggcaccaactcagcctccctcctcaacggctccatgctgcagagagctttgcttttacagcagttgcaaggactggaccagtttgcaatgccaccagccacgtatgacactgccggtctcaccatgcccacagcaacactgggtaacctccgaggctatggcatggcatccccaggcctcgcagcccccagcctcacacccccacaactggccactccaaatttgcaacagttctttccccaggccactcgccagtccttgctgggacctcctcctgttggggtccccatgaacccttcccagttcaacctttcaggacggaacccccagaaacaggcccggacctcctcctctaccacccccaatcgaaaggattcttcttctcagacaatgcctgtggaagacaagtcagaccccccagaggggtctgaggaagccgcagagccccggatggacacaccagaagaccaagatttaccgccctgcccagaggacatcgccaaggaaaaacgcactccagcacctgagcctgagccttgtgaggcgtccgagctgccagcaaagagattgaggagctcagaagagcccacagagaaggaacctccagggcagttacaggtgaaggcccagccgcaggcccggatgacagtaccgaaacagacacagacaccagacctgctgcctgaggccctggaagcccaagtgctgccacgattccagccacgggtcctgcaggtccaggcccaggtgcagtcacagactcagccgcggataccatccacagacacccaggtgcagccaaagctgcagaagcaggcgcaaacacagacctctccagagcacttagtgctgcaacagaagcaggtgcagccacagctgcagcaggaggcagagccacagaagcaggtgcagccacaggtacagccacaggcacattcacagggcccaaggcaggtgcagctgcagcaggaggcagagccgctgaagcaggtgcagccacaggtgcagccccaggcacattcacagcccccaaggcaggtgcagctgcagctgcagaagcaggtccagacacagacatatccacaggtccacacacaggcacagccaagcgtccagccacaggagcatcctccagcgcaggtgtcagtacagccaccagagcagacccatgagcagcctcacacccagccgcaggtgtcgttgctggctccagagcaaacaccagttgtggttcatgtctgcgggctggagatgccacctgatgcagtagaagctggtggaggcatggaaaagaccttgccagagcctgtgggcacccaagtcagcatggaagagattcagaatgagtcggcctgtggcctagatgtgggagaatgtgaaaacagagcgagagagatgccaggggtatggggcgccgggggctccctgaaggtcaccattctgcagagcagtgacagccgggcctttagcactgtacccctgacacttgtcccccgccccagtgactccgtctcctccacccctgcggctaccagcactccctctaagcaggccctccagttcttctgctacatctgcaaggccagctgctccagccagcaggagttccaggaccacatgtcggagcctcagcaccagcagcggctaggggagatccagcacatgagccaagcctgcctcctgcccctgctgcccgtgccccgggacgtcctggagacagaggatgaggagcctccaccaaggcgctggtgcaacacctgccagctctactacatgggggacctgatccaacaccgcaggacacaggaccacaagattgccaaacaatccttgcgacccttctgcaccgtttgcaaccgctacttcaaaacccctcgcaagtttgtggagcacgtgaagtcccaggggcataaggacaaagccaaggagctgaagtcgcttgagaaagaaattgctggccaagatgaggaccacttcattacagtgggcgctgtgggttgcttcgagggtgatgaagaagaggaagaggatgatgaggatgaagaagagatcgaggttgaggaggaactctgcaagcaggtgaggtccagagatatatccagagaggagtggaagggctcggagacctacagccccaatactgcatatggtgtggacttcctggtgcccgtgatgggctatatctgccgcatctgccacaagttctatcacagcaactcaggggcacagctctcccactgcaagtccctgggccactttgagaacctgcagaaatacaaggcggccaagaaccccagccccaccacccgacctgtgagccgccggtgcgcaatcaacgcccggaacgctttgacagccctgttcacctccagcggccgcccaccctcccagcccaacacccaggacaaaacacccagcaaggtgacggctcgaccctcccagcccccactacctcggcgctcaacccgcctcaaaacctgatagagggacctccctgtaccctggcctgcctgggtccagatctgctaatgctttttaggagtctgcctggaaactttgacatggttcatgtttttactcaaaatccaataaaacaaggtagtttggctg

SEQ ID NO: 385 - DNA, 60 bp, Homo sapiens
ctgcctggaaactttgacatggttcatgtttttactcaaaatccaataaaacaaggtagt

SEQ ID NO: 386 - DNA, 1521 bp, Homo sapiens
ctggcgcgggcgggagctgcggcggatacccttgcgtgctgtggagaccctactctcttcgctgagaacggccgctagcggggactgaaggccgggagcccactcccgacccggggctagcgtgcgtccctagagtcgagcggggcaagggagccagtggccgccgacgggggaccgggaaacttttctgggctcctggagagccctgtagccgcgctccatgctccggcagcggcccgaaacccagccccgccgctgacggagcccgccgctccgggcagggcccatgccctgcgcgctccgggggtcgtagctgccgccgagccggggctccggaagccggcgggggcgccgcggccgtgcggggcgtcaatggatcgccactccagctacatcttcatctggctgcagctggagctctgcgccatggccgtgctgctcaccaaaggtgaaattcgatgctactgtgatgctgcccactgtgtagccactggttatatgtgtaaatctgagctcagcgcctgcttctctagacttcttgatcctcagaactcaaattccccactcacccatggctgcctggactctcttgcaagcacgacagacatctgccaagccaaacaggcccgaaaccactctggcaccaccatacccacattggaatgctgtcatgaagacatgtgcaattacagagggctgcacgatgttctctctcctcccaggggtgaggcctcaggacaaggaaacaggtatcagcatgatggtagcagaaaccttatcaccaaggtgcaggagctgacttcttccaaagagttgtggttccgggcagcggtcattgccgtgcccattgctggagggctgattttagtgttgcttattatgttggccctgaggatgcttcgaagtgaaaataagaggctgcaggatcagcggcaacagatgctctcccgtttgcactacagctttcacggacaccattccaaaaaggggcaggttgcaaagttagacttggaatgcatggtgccggtcagtgggcacgagaactgctgtctgacctgtgataaaatgagacaagcagacctcagcaacgataagatcctctcgcttgttcactggggcatgtacagtgggcacgggaagctggaattcgtatgacggagtcttatctgaactacacttactgaacagcttgaaggccttttgagttctgctggacaggagcactttatctgaagacaaactcatttaatcatctttgagagacaaaatgacctctgcaaacagaatcttggatatttcttctgaaggattatttgcacagacttaaatacagttaaatgtgttatttgcttttaaaattataaaaagcaaagagaagactttgtacacactgtcaccagggttatttgcatccaagggagctggaattgagtacctaaataaacaaaaatgtgccctatgtaagcttctacatcttgatttattgtaaagatttaaaagaaatatatatattttgtctga

SEQ ID NO: 387 - DNA, 60 bp, Homo sapiens
atgacctctgcaaacagaatcttggatatttcttctgaaggattatttgcacagacttaa

SEQ ID NO: 388 - DNA, 3532 bp, Homo sapiens
gttcgccgtggaggatgtcccgaaaggggccgcgagcggaggtgtgtgcggactgcagcgccccggaccctggctgggcatccatcagcaggggtgtgctggtgtgtgacgagtgctgcagcgtgcaccggagcctgggacgccacatctccattgtcaagcaccttcgccacagcgcctggcctcccacgctgctgcagatggtgcacacgcttgccagcaacggggccaactccatctgggagcactccctgctggaccccgcacaagtgcagagcggccggcgtaaagcaaacccccaagacaaagtccaccccatcaagtcagagttcatcagggccaagtaccagatgctggcatttgtgcacaagctttcctgccgggacgatgatggagtcaccgccaaagacctcagcaagcaactacactcgagcgtgcggacaggcaacctggagacatgtctgcgcctgctctccctgggtgcccaggccaacttcttccacccagagaagggcaccacacctctgcacgtggctgccaaggcaggacagacactgcaggccgagctgcttgtagtgtatggggctgaccctggctcccctgatgttaatggccgcacacccattgactatgccaggcaggcggggcaccatgagctggcggaaaggctggttgagtgccaatatgagctcactgaccggctggccttctacctctgtggacgcaagccggatcacaagaatgggcattacatcatcccacagatggctgacagccttgacttatccgaattggccaaagctgctaagaagaagctgcaggcgctcagcaaccggctttttgaggaactcgccatggacgtgtatgacgaggtggatcgaagagaaaatgatgcagtgtggctggctacccaaaaccacagcactctggtgacagagcgcagtgctgtgcccttcctgcctgttaacccggaatactcagccacgcggaatcaggggcgacaaaagctggcccgctttaatgcccgagagtttgccaccttgatcatcgacattctcagtgaggccaagcggagacagcagggcaagagcctgagcagccccacagacaacctcgagctgtctctgcggagccagagtgacctcgacgaccaacacgactacgacagcgtggcctctgacgaggacacagaccaggagcccctgcgcagcaccggcgccactcggagcaaccgggcccggagcatggactcctcggacttgtctgacggggctgtgacgctgcaggagtacctggagctgaagaaggccctggctacatcggaggcaaaggtgcagcagctcatgaaggtcaacagtagcctgagcgacgagctccggaggctgcagcgagagatccacaagctgcaggcggagaacctgcagctccggcagcctccagggccggtgcccacacctccactccccagtgaacgggcggaacacacacccatggcgccaggcgggagcacacaccgcagggatcgccaggccttttccatgtatgaacctggctctgccctgaagccctttgggggcccccctggggacgagctcactacgcggctgcagcctttccacagcactgagctagaggacgacgccatctattcagtgcacgtccctgctggcctttaccggatccggaaaggggtgtctgcctcagctgtgcccttcactccctcctccccgctgctgtcctgctcccaggagggaagccgccacacgagcaagctttcccgccacggcagtggagccgacagtgactatgagaacacgcaaagtggggacccactgctggggctggaagggaagaggtttctagagctgggcaaagaggaagacttccacccagagctggaaagcctggatggagacctagatcctgggcttcccagcacagaggatgtcatcttgaagacagagcaggtcaccaagaacattcaggaactgttgcgggcagcccaggagttcaagcatgacagcttcgtgccctgctcagagaagatccatttggctgtgaccgagatggcctccctcttcccaaagaggccagccctggagccagtgcggagctcactgcggctgctcaacgccagcgcctaccggctgcagagtgagtgccggaagacagtgcccccagagcccggcgccccagtggacttccagctgctgactcagcaggtgatccagtgcgcctatgacatcgccaaggctgccaagcagctggtcaccatcaccacccgagagaagaagcagtgacctctctccccacaccctcacctgcaccctaggacctcactggccataggagctgggccactccagacattaatccccaccccaacagagccactggcacaagtgcccttagtgctgccacactccctgggcagccaggtgccctggtgcccacccctgtcgagcccctaaggatggggaggttgggggggcaggagcttctgtcccccacattccatgcacctcccctctgtatatagcatctcccccctcctagtgagcaggggcctgcaaggattcactcccagcccctcgccttctagggcaccctcagcaaaggggcaggtggggacactccaagtggggcagctctccgtacatgcgccccacccccatgagccagttcagccctactgggggctgagcgggggcatcccctcctttgtacatagtctccatggatgtccctgccctgtagccaccagccccttgctgctctccctttaatgccatatggcccctgcctagggcacaggccccaacctgtgtgctggggtccccagcaggcaaacactggaaagtctgttttttttttttctttcttcttccccaccccttaattttaactttgtggtaactgagtgcccccgcgtgcctgcgtgttgagtgtgtgggcggcagtgctttccggaggcctggtccatctggagttttgaggggtgaggggaccagagcagtgggaccagcatggggatcagcttcccttccccacctgggagccagggactgtccgggtagccagttttggtcctgccagctgcctccctgatccctccccactctcgccccttctctatgaacttaaaatcaaaaaaccacttccctcccatctcctccctgctcctgcgtggagggggaatgtgtgctggccagggtggaggactgagcacctgagcctggggctggctccccggggtccccgactcagctggtggctgtggagctgagtcccctccccgtaacctctgcaaggccagcacccaccatcactacctgcacctgctgtggtcccaccctctggaggcctgggaacctggctgcagcctgggaaggctggagaggcagacggtgggacccaccagctctctccccatcccgcttcttccctggggccaggccctacctgtgtggtggtgggtgggctgtcaagacgtgtcatgtacatttgtatcaaaaataaagaagtgaccatg

SEQ ID NO: 389 - DNA, 60 bp, Homo sapiens
gtgggtgggctgtcaagacgtgtcatgtacatttgtatcaaaaataaagaagtgaccatg

SEQ ID NO: 390 - DNA, 4258 bp, Homo sapiens
gacaaaatcaggttcagaggtcacaagagagatgacttcctcgatctagcggagtctccaaatgcctcggacaccgaatgcagcgacgaaatccccctgaaggtaccgcggacctcgccccgggacagcgaggagctgagggaccctgctggtccagggaccctcatcatggccacaggagtccaggactttaaccggacagagtttgatcgactgaatgagatcaaaggtcacctggaaattgccttattggaaaaacatttcttacaggaggagctccggaagctgcgagaagaaaccaacgcggagatgctgcggcaggagctggaccgcgagcggcagcggcggatggagctggagcagaaggtgcaggaggtgctgaaggccagaaccgaggagcagatggctcagcagcccccaaaagggcaggcccaggccagcaatggagcagagcgccggagccaggggctgtcctcgcgcctgcagaagtggttctacgagcggttcggggagtacgtggaggacttccggttccagcccgaggagaacactgtggagacagaggaacccctgagcgcccgcaggttaactgaaaatatgagacggctcaagcgcggtgccaagccggtcactaactttgtgaagaacctctctgccttatccgactggtactccgtctacacgtctgccattgccttcaccgtgtacatgaatgccgtgtggcatggctgggccatcccattgttcttatttctagcaattctgaggttatccctcaattacctcatcgccagggggtggcggatacagtggagcatcgtgcccgaagtgtctgagcccgtggaacctccaaaggaagacctgactgtgtctgagaagttccagctggtgctggacgtcgcccagaaagcccagaaccttttcgggaagatggctgacatcctggagaagatcaagaacttgttcatgtgggtccagccggagatcacacagaagctgtatgtggcgctctgggctgccttcctggcctcctgcttcttcccctaccgcctggtggggcttgccgtgggactctatgctggtatcaagttcttcctcattgatttcatctttaaacgctgcccgaggctgcgcgccaagtacgacacgccctatatcatctggaggagtctccccaccgacccgcagctcaaggagcgctccagcgccgcagtctcacgcaggctgcagacgacctcgtcacggagctacgtacccagcgcaccggccggcctgggtaaagaggaggacgccggtcgcttccacagcaccaagaagggcaatttccacgagatcttcaatctgacagaaaacgagcgtccgctggcggtgtgcgagaatggctggcgctgctgcctcatcaacagggaccggaagatgcccacggactacatcaggaacggggtgctctacgtcacggagaattacttgtgcttcgaaagctccaaatctgggtcctcaaagaggaacaaagtcatcaagctagtggacatcacggacatccagaagtacaaggtcctgtctgtcctcccaggctcaggcatggggattgccgtgtcgacgccatccacccagaaaccgctcgtgtttggtgccatggtgcacagggatgaggccttcgagaccattctcagccagtacatcaagatcacctcagcggcagcgtctggcggggacagctagtattgacttgcccaggacgttgctggaattttctttttctttttctttttctttttttttttttacgatttggtagtggaaacaattggacatcctcatgagcttttgcaataattctcctggacctgtggttctattgtgttgacctctgcgttttatcgaccaagaaggggccagggctcacagggacgggggtgcccctctcccacagggcacgtcaggtgcctctgagggccacccgcagactgggggagggggcagaggccctcgggggcccgtggagaagacacacaggacccctggccctgcccttctccgttccagcctggacagagaaacctctccagccaccccaagaggttctcgcaaccttgtgtcccgctctccagaggccagaagctcgtccaccaccaaagccatagctgaagagtgcggggcccttcctcctggggacagaaagatgtcgtcaaggagggacatgggggcctttcaccaaccaccgagaaacgggcctggcggccctccttcctcttacatgagaccctcctgtggcatttgcccttggtgccgggctggggccgggcgcagtgaccctgcctgcgctccacactcgctccacgggaacagagagggtgagaagggcccacccctcacctgccctcagtgtctttggtggcaccttccttgctggcctccagggcgctcagcaccgtgtctgtaagggcctgcctgctgctctcggcctgacacgccggccaggaggtctgtagctggggaccagtaagggcacaggatggtgcaggtaaaagcacatctttctcacactttgctctttggaaggcccaggagaacatccgcgaaggctgttggaggtgctccgagcactgtggcatgtctggcacatggcccccaggctgcggttgcctgggttggttgggggaggaagtggggaggagtgttccgggaccatggtggcccaggctgcagccgcctttgggccatccgagaggctctggcagcccctgtgctttagggagcaaccgtgagccgagcccagaggcctgggcctgcactgcctgcagccgacatgcgacagcgttccctcccccgcgtgcctagccggtgccggtccgggcacagacccccccagcccccgccctgccccagggaagcctgggcttcccgggaacaaggtggcatttgtggagggagcgcccgcaggcctggtctgctggggccgcctgcgctgggctgaagggagggaaaggcggcttgggcctcctggaaggaggtggccaccccgcgggcctgcgtgtctgctggggcggatcccgcagctccctcagcttgtcctgagtcccttgggtgtcgttgagattgttgttttttgaagaaacagaagattctattttttacagcgagcaagctggttttcttatttttgtatcctttttcagatgtaatttttatctttgctccgatcctcatttgctggtgtgggtgagggatccggcggcatgggctggtttcacccccttcacgaggggccgcagagtcacacgctggtgccgggggtgctttggggggagctgcgccgatcaccagattaagcacatgtcctatcccaggcggtggagcggagcccccgtggctctggactgcgcggacgttggcgtcaggatgaccacacggcggcctttcccgaatggggacagaacccgctctgagccgtgggtctggctcctgtaggggactggctctcttggtgcaccaggggagggggacatatcccagtgaaccccaccttggcgcctgaggcaacacagggtgggcactgacccacccccaggggcggctgcagaggcagtgcccgcagacaatggccacacctctctccccagggcccggcagtgcccaaggatgggtccggggcctcggggccaatgagcgcctcttcctaggtgctgggattcagtccccaaacacagcgggaggggtccctggggcagatggggctttaccagcgtcgggtggtttagttcgagtcccttttgtggagaaagggagatgaaaactgaccacgtgccaggtgtggccgaagcccccagggagggccacattcggggagcggggggtcgggggagggccaccgactggctctgctgccagcacaggcccctccctggaagtcctcgggagcggagcgcggatcggcacgggctctgggctccccgtggagagaagctgtagtttttaccaaattgtgtacatctgggcagatgtttaatttctgtgactaatcactgaactagacgaatgttaaattttttatgtctgaagcctgagtctattttggatctgtaaataatcattgccagtgtgacttttgttcaacaaaaggattgtactgtattaagaaccgatgaaaaaaattctcctgtaacatttttttaagaaaactttgtttgtttaaagaaaaagtattgtataaattataatttttatttaaataaacctaaaatgctttgtgctaagg

SEQ ID NO: 391 - DNA, 60 bp, Homo sapiens
gtacatctgggcagatgtttaatttctgtgactaatcactgaactagacgaatgttaaat

SEQ ID NO: 392 - DNA, 5449 bp, Homo sapiens
gcgccgggggccgccgcgcccgccgcccgctgcctgcgccgccggccgggcatgagttagtcgcagacatggacaccaaacatttcctgccgctcgatttctccacccaggtgaactcctccctcacctccccgacggggcgaggctccatggctgccccctcgctgcacccgtccctggggcctggcatcggctccccgggacagctgcattctcccatcagcaccctgagctcccccatcaacggcatgggcccgcctttctcggtcatcagctcccccatgggcccccactccatgtcggtgcccaccacacccaccctgggcttcagcactggcagcccccagctcagctcacctatgaaccccgtcagcagcagcgaggacatcaagccccccctgggcctcaatggcgtcctcaaggtccccgcccacccctcaggaaacatggcttccttcaccaagcacatctgcgccatctgcggggaccgctcctcaggcaagcactatggagtgtacagctgcgaggggtgcaagggcttcttcaagcggacggtgcgcaaggacctgacctacacctgccgcgacaacaaggactgcctgattgacaagcggcagcggaaccggtgccagtactgccgctaccagaagtgcctggccatgggcatgaagcgggaagccgtgcaggaggagcggcagcgtggcaaggaccggaacgagaatgaggtggagtcgaccagcagcgccaacgaggacatgccggtggagaggatcctggaggctgagctggccgtggagcccaagaccgagacctacgtggaggcaaacatggggctgaaccccagctcgccgaacgaccctgtcaccaacatttgccaagcagccgacaaacagcttttcaccctggtggagtgggccaagcggatcccacacttctcagagctgcccctggacgaccaggtcatcctgctgcgggcaggctggaatgagctgctcatcgcctccttctcccaccgctccatcgccgtgaaggacgggatcctcctggccaccgggctgcacgtccaccggaacagcgcccacagcgcaggggtgggcgccatctttgacagggtgctgacggagcttgtgtccaagatgcgggacatgcagatggacaagacggagctgggctgcctgcgcgccatcgtcctctttaaccctgactccaaggggctctcgaacccggccgaggtggaggcgctgagggagaaggtctatgcgtccttggaggcctactgcaagcacaagtacccagagcagccgggaaggttcgctaagctcttgctccgcctgccggctctgcgctccatcgggctcaaatgcctggaacatctcttcttcttcaagctcatcggggacacacccattgacaccttccttatggagatgctggaggcgccgcaccaaatgacttaggcctgcgggcccatcctttgtgcccacccgttctggccaccctgcctggacgccagctgttcttctcagcctgagccctgtccctgcccttctctgcctggcctgtttggactttggggcacagcctgtcactgctctgcctaagagatgtgttgtcaccctccttatttctgttactacttgtctgtggcccagggcagtggctttcctgaggcagcagccttcgtggcaagaactagcgtgagcccagccaggcgcctccccaccgggctctcaggacaccctgccacaccccacggggcttgggcgactacagggtcttcgggccccagccctggagctgcaggagttgggaacggggcttttgtttccgttgctgtttatcgatgctggttttcagaattcctgtgtggccctcctgtctggagtgacatcttcatctgctctgaatactggtgcccagccagcccgtgacagcttccccctaatcaggaggggacagctgggggcgcaagctggtgtgtcatcagcaaagacctcagccgcctcggggatgagaggggactcgtggggcaagcaagctgccctgtgctctgagtgagggggaaggtagcccctttttccaaagataactcacagttttgccctcgagccaatgagaacatgagctgccctctgtgcaaggtttcggggccacctccaggctgcaggggcgggtcactcacccccctgttttctctctgccttggtgttctggtttcagactcccgactccccgttcagaccagagtgccccggcccctccccagcctgagtcttctccttgctctgcggggtgggctgaggcttgtccttgtttcctgcagggctggccctggctcgggcagggtggggcatcaccacctcactggccttgctggaggcacagggctctgcggacctgcagccatctgtgaggcccgcggggatgggaggggaggagggtggcctgttggtttccctcagagggggcaggtggcctggagagagaggggctcaggaactgggagcctcgtgggtggggcagatgctccgcggcctggagtggctctgccggggcattggtgggacccctgctcaggccttctctctggctgccagttgtgtctaaaagactcttggaatctgagaacccggagtcgcagcgccctcgggcctgggccacacgcaggccctggtgggaccacccagcctggtattgtccacggacagcgttgttcacccagagccttacttgggagcctcactgaacgcctgctctggttgaaggtggggtgggggcggggcttggggcctccctggctcagcccagtgcggcctggcgctcctcccgcaggctctgcccccgggctccggtggtgcggggccctctcaggttgaactcgcctcttttgcactggaaggccctccctttggcctgagtacttttcccgttcacgcctcagtcccgtggacccagcctttgtcagtggcaggtgcctgaacagagggtggatgggggggataccggagggggtcttgtcttcccagccgcagtctaggaatgatgcgggggggtggacgccttctccatagtctttccccacctggagcaggggcttcctcagtggtgaggggagctgcctacaggttggaccgggaggcagtggcttggagaggcagctttccagccttggtggggaagaaagtgtccattctttgccttcctggagctcccagccagagctgagcttaggcacccgagtggagcctgcagctgagtctgtgcccgagacaggctgtcagagattccagaagcctctcctccccgccgccctccacccctgcctttcagcgttgtggatccctagaggtggccccctgcccgatccaccgtcctgaggcagagtgttgagcctcatacctgtaccaggtccccggccagctgggcccctcccaggcactgccaggaagccccagctgcccctggcgggtgtggtggaaatggcaggagggtgcaggtactcttggggccccagcggtgggagtgcaaaagacccaacgccaacacctggtgccttttgcagccagcgcccacccatccgtgcccggacccttgggaatgcccgcggctccagaggaaaaagcccagggacggggcctccgttgcggggggtcggctgcttcttgggaactttgtcgtttccggcgctggctggctggctggctgtaaagcactgaagccccccggccgccaacccctgaaagcagaacctggcctccctggccacagcagccttacccaccgctctacgtgtcccgggcacttcccgcagccttcccgtccctttctcatcggccttgtagttgtacagtgctgttggtttgaaaaggtgatgtgtggggagtgcggctcatcactgagtagagaggtagaatttctatttaaccagacctgtagtagtattaccaatccagttcaattaaggtgattttttgtaattattattattttggtgggacaatctttaattttctaaagatagcactaacatcagctcattagccacctgtgcctgtccccgccttggcccggctggatgaagcggcttccccgcagggcccccacttcccagtggctgcttcctggggacccagggcaccccggcaccttcaggcacgctcctcagctggtcacctcccggctttgccgttcagatggggctcctgaggctcaggagtgaagatgccacagagccgggctcccctaggctgcgtcgggcatgcttggaagctggcctgccaggaccttccaccctggggcctgtgtcagccgccggccctccgcaccctggaagcacacggcctctgggaaggacagccctgaccttcggttttccgagcacggtgtttcccaagaattctgggctggcggcctggtggcagtgctggagatgaccccgagcccctccccgtggggcacccaggagggccctgccggaatgtgcagcctgtgggtagtcggctggtgtccctgtcgtggagctggggtgcgtgatctggtgctcgtccacgcaggtgtgtggtgtaaacatgtatgtgctgtacagagagacgcgtgtggagagagccgcacaccagcgccacccaggaaaggcggagcggttaccagtgttttgtgtttatttttaatcaagacgtttcccctgttttcctataaatttgcttcgtgtaagcaagtacataaggaccctcctttggtgaaatccgggttcgaatgaatatctcaaggcaggagatgcatctattttaagatgctttggagcagacagctttagccgttcccaatccttagcaatgccttagctgggacgcatagctaatactttagagaggatgacagatccataaagagagtaaagataagagaaaatgtctaaagcatctggaaaggtaaaaaaaaaaaatctatttttgtacaaatgtaattttatccctcatgtatacttggatatggcggggggagggctgggactgtttcgtttctgcttctagagattgaggtgaaagcttcgtccgagaaacgccaggacagacgatggcagaggagagggctcctgtgacggcggcgaggcttgggaggaaaccgccgcaatgggggtgtcttccctcggggcaggagggtgggcctgaggctttcaagggttttcttccctttcgagtaatttttaaagccttgctctgttgtgtcctgttgccggctctggccttcctgtgactgactgtgaagtggcttctccgtacgattgtctctgaaacatcgtggcctcaggtgccagggtttgatggacagtagcattagaattgtggaaaaggaacacgcaaagggagaagtgtgagaggagaaacaaaatatgagcgtttaaaatacatcgccattcagttcgttaaaaaaaaaaaaaaaaaaaaaaaaa

SEQ ID NO: 393 - DNA, 60 bp, Homo sapiens
cactgctctgcctaagagatgtgttgtcaccctccttatttctgttactacttgtctgtg

SEQ ID NO: 394 - DNA, 1121 bp, Homo sapiens
ctagctctgtgggaaggttttgggctctctggctcggattttgcaatttctccctggggactgccgtggagccgcatccactgtggattataattgcaacatgacgctggaagagctcgtggcgtgcgacaacgcggcgcagaagatgcagacggtgaccgccgcggtggaggagcttttggtggccgctcagcgccaggatcgcctcacagtgggggtgtacgagtcggccaagttgatgaatgtggacccagacagcgtggtcctctgcctcttggccattgacgaggaggaggaggatgacatcgccctgcaaatccacttcacgctcatccagtccttctgctgtgacaacgacatcaacatcgtgcgggtgtcgggcaatgcgcgcctggcgcagctcctgggagagccggccgagacccagggcaccaccgaggcccgagacctccactgtcttcccttcctacagaaccctcacacggacgcctggaagagccacggcttggtggaggtggccagctactgcgaagaaagccggggcaacaaccagtgggtcccctacatctctcttcaggaacgctgaggcccttcccagcagcagaatctgttgagttgctgccaacaaacaaaaaatacaataaatatttgaaccccctcccccccagcacaacccccccaaaacaacccaacccacgaggaccatcgggggcaggtcgttggagactgaagagaaagagagagaggagaagggagtgaggggccgctgccgccttccccatcacggagggtccagactgtccactcgggggtggagtgagactgactgcaagccccaccctccttgagactggagctgagcgtctgcatacgagagacttggttgaaacttggttggtccttgtctgcaccctcgacaagaccacactttgggacttgggagctggggctgaagttgctctgtacccatgaactcccagtttgcgaattaataagagacaatctattttgttacttgcacttgttattcgaaccactgagagcgagatgggaagcatagatatctatatttttatttctactatgagggccttgtaataaatttctaaagcctcaaaaaa

SEQ ID NO: 395 - DNA, 60 bp, Homo sapiens
tacccatgaactcccagtttgcgaattaataagagacaatctattttgttacttgcactt

SEQ ID NO: 396 - DNA, 1864 bp, Homo sapiens
gtggtttttcggatcatgtctggtggctccgcggattataacagagaacatggcggcccagagggaatggaccccgatggtgtcatcgagagcaactggaatgagattgttgataactttgatgatatgaatttaaaggagtctctccttcgtggcatctatgcttacggttttgagaagccttccgctattcagcagagagctattattccctgtattaaagggtatgatgtgattgctcaagctcagtcaggtactggcaagacagccacatttgctatttccatcctgcaacagttggagattgagttcaaggagacccaagcactagtattggcccccaccagagaactggctcaacagatccaaaaggtaattctggcacttggagactatatgggagccacttgtcatgcctgcattggtggaacaaatgttcgaaatgaaatgcaaaaactgcaggctgaagcaccacatattgttgttggtacacccgggagagtgtttgatatgttaaacagaagatacctttctccaaaatggatcaaaatgtttgttttggatgaagcagatgaaatgttgagccgtggttttaaggatcaaatctatgagattttccaaaaactaaacacaagtattcaggttgtgtttgcttctgccacaatgccaactgatgtgttggaagtgaccaaaaaattcatgagagatccaattcgaattctggtgaaaaaggaagaattgacccttgaaggaatcaaacagttttatattaatgttgagagagaggaatggaagttggatacactttgtgacttgtacgagacactgaccattacacaggctgttatttttctcaatacgaggcgcaaggtggactggctgactgagaagatgcatgccagagacttcacagtttctgctctgcatggtgacatggaccagaaggagagagatgttatcatgagggaattccggtcagggtcaagtcgtgttctgatcactactgacttgttggctcgcgggattgatgtgcaacaagtgtctttggttataaattatgatctacctaccaatcgtgaaaactatattcacagaattggcagagggggtcgatttgggaggaaaggtgtggctataaactttgttactgaagaagacaagaggattcttcgtgacattgagactttctacaatactacagtggaggagatgcccatgaatgtggctgaccttatttaattcctgggatgagagttttggatgcagtgctcgctgttgctgaataggcgatcacaacgtgcattgtgcttctttctttgggaatatttgaatcttgtctcaatgctcataacggatcagaaatacagattttgatagcaaagcgacgttagtcgtgagctcttgtgaggaaagtcattggctttatcctctttagagttagactgttggggtgggtataaaagatggggtctgtaaaatctttctttcttagaaatttatttcctagttctgtagaaatggttgtattagatgttctctatcatttaataatatacttgtggactaaaagatataagtgctgtataaaatcagccaattatgttaaactagcatatctgcctttattgtgtttgtcattagcctgagtagaaaggcctttaaaatttttttagaaagcatttgaatgcattttgtttggtattgtatttattcaataaagtatttaattagtgctaagtgtgaactggaccctgttgctaagccccagcaagcaatcctaggtagggtttaatccccagtaaaattgccatattgcacatgtcttaatgaagtttgaatgttaaataaattgtatattcacttt

SEQ ID NO: 397 - DNA, 60 bp, Homo sapiens
ggttataaattatgatctacctaccaatcgtgaaaactatattcacagaattggcagagg

SEQ ID NO: 398 - DNA, 3828 bp, Homo sapiens
cagtgccaggctggaggcggcagcggttggaggcttcgcccggctttgcagcggggacttcggcggcggcgcctcaggcacctcggcccggacacgatgaggcgagtggtacgacagagcaagtttcggcatgtatttgggcaagcggtgaaaaatgaccagtgctatgatgacatccgggtttctcgtgtgacctgggatagttccttttgtgctgtcaatcccagatttgttgccataatcatagaggcaagtgggggaggagcgttccttgtcctccctctgcacaagactggtcgaattgacaaatcttaccctacagtatgtggccacacaggaccagtgctggacatagactggtgcccacataacgatcaggtcattgccagcggttcagaggactgcacggtcatggtatggcagatcccagaaaatggactcaccctttccctgactgaacctgtggtgattttggaaggccactcaaagagagtcggcatcgtggcttggcatccaacggcccgcaatgtgcttcttagtgcaggctgtgataatgccattatcatctggaatgtgggaacaggggaagcccttataaacttggacgatatgcattcagacatgatttacaatgtgagctggaaccggaatggcagtctgatctgcacagcttccaaagacaagaaagtgagagtcattgatcccaggaaacaagagattgttgctgagaaggagaaagcacatgaaggagcaagacccatgagagccatcttcctggccgatggcaatgtcttcaccactgggttcagccgcatgagcgagcggcagctggctctctggaatccgaaaaatatgcaggaaccaattgctcttcatgagatggacactagcaatggggtgttgctgcctttctatgaccctgacaccagcatcatttacttatgtggaaagggtgacagcagtattcgctattttgagatcacggatgaatccccgtacgtccactacctcaacacattcagcagcaaggagcctcagagagggatgggttacatgcccaagaggggacttgatgttaacaaatgtgagattgccagattcttcaaacttcatgagagaaagtgtgaacctattattatgactgttcccaggaagtctgaccttttccaagatgacctgtatcctgacacagcggggccagaggccgcgctggaggcagaagagtggttcgaaggcaagaatgcagacccaatcctcatctccttgaagcacgggtacattccaggcaaaaacagggatctcaaggtggtcaagaagaacattctggatagcaagcccactgcaaacaagaagtgcgacctgatcagcatccccaagaaaaccacagacacggccagtgtgcaaaatgaagccaagttggatgagattttaaaagagatcaaatctataaaagacacaatctgcaatcaagatgagcgtatttccaagttagaacagcagatggcaaagatagcagcctgaaggtcccacccccacccctacagaaaaaatgggagcaagaacttgtgcttgggagctggttattggtgtggtcctagggagggcggaaagggaggcactgccatttggagacattccatttcagatttgtcaaccagcgataggccacattccagtaagaactcaatttgtctcccaaatttgcagaaacaaaacgtgatttaaaagctgagctttttatcagaaagcttttttgatgttttaagtgttatgtgacttgttgaactttttaaaaagtgctacttttaaaatcccagatactctgaattttagaaaacaaactaattctgattgtgtcgtgcccaagtacccttttttttttaatgaatagggaccaatgccacattgctttttatatttctttcttttttaatgttgccaaaaccaaaagtagctttgttttcctttgtattttgctactttgcagtatttgtgtgtgtggttttttttccttaatttgaaagggacagcactgtgtatgtttataaactaaatgaagataagatattattttgtataaacattcatctgagaacaatcaaagcagtagccacatggtgctggctcctttgcagcacaaacctggtcattttgatgactgtacaacaggaagacttgaaaaatcacgtggattcatattaccaccgctctcatttcatggagtcttctgatcaaaaaagctcacgtcgtatttcttcttttcctttctcttttctagaaattgggtgtttgtaccagaatggaattttgcttctcggttatcctgtgcttcagatgattataatctaacccaaactagcatgtgtttctgcagtttgttacacacctaggatcatattgcattcatcactttaaacatcatgtttcaggttttggtcaatacttgacaagggtgcccaggacaggaagacgtgtactgctgagtgttccttcttgcccttttcagcagcttgcccagctcttgagtacagtggtggggactaaaaatgtgggcatgtggagaggggtatttgccctgggtgatcctgtttccctgtgctgtccccatgctgtgttggaggaggaagtggctctccttccaccaacaaagctcctgctctaccctcttcctcacatgtgctgcgacctctctcagggctcccccagccattccttctttccttcctgccttttagctctaaccacattaagctaagacaaggccagagggtgcgattgaatgagtattgagactgaggagaatgatagagagtgaagcagaaacaggagcacagacctctgctgtagctttaatgcatacaaacatgtccctccgcacaactaacctgccctgcctctccatctctcaccaaggctgcgtcaaagcacagaggctccccggactcggagggggccagagactgagctctggtcacctgttcattcctcggttagctggaactttgccccgtttccagtttcttatagtgcatgcttgggaaacaagatttaaggagcctctgttttggaagggctgtctgtgattgaacgtgaaatgtgtagtgccattgggaccacgaagggaattcttgcacatgctcgtgctggtgtgggcatgggactggctggaaacgtctgtatgcagggagccagggtgagggcagagtgtggtgacagccgaacttggagtaatgtccgtgtagaaaaaggaccatgttcttatccagccaatactgggagtgctgtctccacaatttcagggcatctgaatgtttgatgtggttttgtgtgtgtgtatgtatgtgtttaatattgaagtggatcatgagatgtaaagaaaacaataatggcaatgacttatattcaaatctgtatttgtttctttatcaatgtaatctgctgaggaccttttgtctaagattcagtagtgttttaaggttctgatatcgaattaatgaagtaaagttgttgatggtggtgaaacaccgtagggcatgtggttcaaagagaagcaggagggcaagggaaagttaccctgatcttagtttgtagcttatgacttatttaatgaatggatgcccagccaagctcagagtaggcgcccaaagcattgtggattattttcctgttttgtctttttttttttttttttttaagccatgacatcccagaagaggacagtgaattactcctaggtcggctcttatagagtggccatagtgttctgtcaaaacacttgcttccattttcagagataaaaatcattgattacaaaaaaaaaaaaaaaaa

SEQ ID NO: 399 - DNA, 60 bp, Homo sapiens
tttgatgactgtacaacaggaagacttgaaaaatcacgtggattcatattaccaccgctc

SEQ ID NO: 400 - DNA, 1908 bp, Homo sapiens
gaaagatggcgtcctcggagcaggcagagcagccgagccagccaagctctactccaggaagtgaaaatgtgctgcctcgagagccgctgattgccacggcagtgaagtttctacagaattcccgggtccgccagagcccacttgcaaccaggagagcatttctaaagaagaaagggctgacagatgaagagattgatatggccttccagcagtcgggcactgctgccgatgagccttcgtccttgggcccagccacacaggtggttcctgtccagccccctcacctcatatctcagccatacagtcccgcaggctcccgatggcgagattacggcgccctggccatcatcatggcaggcattgcatttggctttcaccagctctacaagaaatacctgctccccctcatcctgggcggccgagaggacagaaagcagctggagaggatggaggccggtctctctgagctgagtggcagcgtggcccagacagtgactcagttacagacgaccctcgcctccgtccaggagctgctgattcagcagcagcagaagatccaggagcttgcccacgagctggccgctgccaaggccaccacatccaccaactggatcctggagtcccagaatatcaacgaactcaagtccgaaattaactccttgaaagggcttcttttaaatcggaggcagttccctccatccccatcagccccgaagatcccctcctggcagatcccagtcaagtcaccgtcaccctccagccctgcggccgtgaaccaccacagcagcagcgacatctcacctgtcagcaacgagtccacgtcgtcctcgcctgggaaggagggccacagccccgagggctccacggtcacctaccacttgctgggcccccaggaggaaggcgagggggtggtggacgtcaagggccaggtgcggatggaggtgcaaggcgaggaggagaagagggaggacaaggaggacgaggaggatgaggaggatgatgatgtgagccatgtggacgaggaggactgcctgggggtgcagagggaggaccgccggggcggggatgggcagatcaacgagcaggtggagaagctgcggcggcccgagggcgccagcaacgagagtgagcgggactagggctgcgcctgctgcctccagccctgaggatggcatctagtgtgcccgtgcgtggccataccctgcctccctctctggccctgggagggcagcttggagcccaggtagggggcagagctgtcctcagctgcactgcggcctggtggcagtgtggggagtcacacttctgtccacctggcctcctctcgcctggccgccagccccagccccagccccagccccaggcccagctgcctttggctttgatctcaagtcaggctgaaggcagcgaagcctcggggcccaagcccctccccagccccctctcccggacagacgccttgcccagggtgtgtttgctgagtgtcttgactaccgtgacaccacgcatggccagagctagcgtccctactgcctcccgactcctcagtggaggaggagctgcggtccctctggtgtctgccatccccctccctccctgggcccggccctggacccgtcaggtgcctgtccccagccccaaccccactcatgccccgtcgtcctcccagacaaatgaaaccacgctgcgcttccgatgcccccgcttgccgtgtaatggttcagctaatcccatggcgagatgggggctcattccggaggaggagccaggcagcagggccttcctgaccaacagccagttttgtccttccccccaggaaaaaaatgttcatttgtgtgatcatgtatagacctcagaacggaagataggactgtatataattgtaataaataccagttgccactattt

SEQ ID NO: 401 - DNA, 60 bp, Homo sapiens
gacctcagaacggaagataggactgtatataattgtaataaataccagttgccactattt

SEQ ID NO: 402 - DNA, 1582 bp, Homo sapiens
ccgagctgtgcttgtggctgcggctgctaactggctgcgcacagggagctgtcaccatgcctcactcgtacccagccctttctgctgagcagaagaaggagttgtctgacattgccctgcggattgtagccccgggcaaaggcattctggctgcggatgagtctgtaggcagcatggccaagcggctgagccaaattggggtggaaaacacagaggagaaccgccggctgtaccgccaggtcctgttcagtgctgatgaccgtgtgaaaaagtgcattggaggcgtcattttcttccatgagaccctctaccagaaagatgataatggtgttcccttcgtccgaaccatccaggataagggcatcgtcgtgggcatcaaggttgacaagggtgtggtgcctctagctgggactgatggagaaaccaccactcaagggctggatgggctctcagaacgctgtgcccaatacaagaaggatggtgctgactttgccaagtggcgctgtgtgctgaaaatcagtgagcgtacaccctctgcacttgccattctggagaacgccaacgtgctggcccgttatgccagtatctgccagcagaatggcattgtgcctattgtggaacctgaaatattgcctgatggagaccacgacctcaaacgttgtcagtatgttacagagaaggtcttggctgctgtgtacaaggccctgagtgaccatcatgtatacctggaggggaccctgctcaagcccaacatggtgaccccgggccatgcctgtcccatcaagtataccccagaggagattgccatggcaactgtcactgccctgcgtcgcactgtgcccccagctgtcccaggagtgaccttcctgtctgggggtcagagcgaagaagaggcatcattcaacctcaatgccatcaaccgctgcccccttccccgaccctgggcgcttaccttctcctatgggcgtgccctgcaagcctctgcactcaatgcctggcgagggcaacgggacaatgctggggctgccactgaggagttcatcaagcgggctgaggtgaatgggcttgcagcccagggcaagtatgaaggcagtggagaagatggtggagcagcagcacagtcactctacattgccaaccatgcctactgagtatccactccataccacagcccttggcccagccatctgcacccacttttgcttgtagtcatggccagggccaaatagctatgcagagcagagatgccttcacctggcaccaacttgtcttcctttctctcttcccttcccctctctcattgctgcacctgggaccataggatgggaggatagggagcccctcatgactgagggcagaagaaattgctagaagtcagaacaggatggctgggtctccccctacctcttccagctcccacaattttcccatgatgaggtagcttctccctgggctctccttcttgcctgccctgtctcctgggatcagagggtagtacagaagccctgactcatgccttgagtacataccatacagcaaataaatggtagcaaaacaaaaaaaaaaaaaaaaaaaaaaaaaa

SEQ ID NO: 403 - DNA, 60 bp, Homo sapiens
gagggtagtacagaagccctgactcatgccttgagtacataccatacagcaaataaatgg

SEQ ID NO: 404 - DNA, 2172 bp, Homo sapiens
ccgggctgccaggcgcccagctgtgcccagatggatgggacagagacccggcagcggaggctggacagctgtggcaagccaggggagctggggcttcctcaccccctcagcacaggaggactccctgtagcctcagaagatggagctctcagggcccctgagagccaaagcgtgacccccaagccactggagactgagcctagcagggagaccgcctggtccataggccttcaggtgaccatgcccttcatgtttgcaggcctgggactgtcctgggccggcatgcttctggactatttccagcactggcctgtgtttgtggaggtgaaagaccttttgacattggtgccgcccctggtgggcctgaaggggaacctggagatgacactggcatccagactctccacagctgccaacactggacaaattgatgacccccaggagcagcacagagtcatcagcagcaacctggccctcatccaggtgcaggccactgtcgtggggctcttggctgctgtggctgcgctgctgttgggcgtggtgtctcgagaggaagtggatgtcgccaaggtggagttgctgtgtgccagcagtgtcctcactgccttccttgcagcctttgccctgggggtgctgatggtctgtatagtgattggtgctcgaaagctcggggtcaacccagacaacattgccacgcccattgcagccagcctgggagacctcatcacactgtccattctggctttggttagcagcttcttctacagacacaaagatagtcggtatctgacgccgctggtctgcctcagctttgcggctctgaccccagtgtgggtcctcattgccaagcagagcccacccatcgtgaagatcctgaagtttggctggttcccaatcatcctggccatggtcatcagcagtttcggaggactcatcttgagcaaaaccgtttctaaacagcagtacaaaggcatggcgatatttacccccgtcatatgtggtgttggtggcaatctggtggccattcagaccagccgaatctcaacctacctgcacatgtggagtgcacctggcgtcctgcccctccagatgaagaaattctggcccaacccgtgttctactttctgcacgtcagaaatcaattccatgtcagctcgagtcctgctcttgctggtggtcccaggccatctgattttcttctacatcatctacctggtggagggtcagtcagtcataaacagccagacctttgtggtgctctacctgctggcaggcctgatccaggtgacaatcctgctgtacctggcagaagtgatggttcggctgacttggcaccaggccctggatcctgacaaccactgcatcccctaccttacagggctgggggacctgctcggtactggcctcctggcactctgctttttcactgactggctactaagagcaaggcagagctgggtggcatctcagaactggcatctggacctccctaactgggccccgctggtcccatttgctcattagaatttcctctcacatcagtgggatacagaattcagtttctcccttgccaggtccttgggatggttgacccctgcctctgcagtagccttttgtgagtctgctaaggtagctctcacacacctcggctctggggttgatacctgagcctgcaatagagccctgaaatcaagagcatggcttgagtgtgtgaatatgatgtgtgcacatgcttaatgagcgtgcaagtgtgcacacgtttgtggagaggagggtgttctggcctgagaaggtaaagaagaggcatgtccagtatgctttgcagggtgtgtttgctcttttccatgcccatgcaacccagattggggtggagcaggaaggagctcttttctgttcccaagcctcagaactcttgagctgtggcttacttgctgtcttcaccaggttcaagctccgtgggccacactgctgctgtgccaagaaggtgtacagcctccccaggatggggcctcatacaacccttcatctgcactcaacatttaatcgtgtccttgctgtctttttattttcctttttgtttgttagcaaaaacctctatttagatttcaataatcagagaagtgtaaaataaaacagattatattgtaaaaaaaaaaaaaaaaaaaaaaaaaa

SEQ ID NO: 405 - DNA, 60 bp, Homo sapiens
atggggcctcatacaacccttcatctgcactcaacatttaatcgtgtccttgctgtcttt

SEQ ID NO: 406 - DNA, 2239 bp, Homo sapiens
agtcgcaacagaagcaggtccgaggcacagcccgatcccgccatggagcagccgaggaaggcggtggtagtgacgggatttggcccttttggggaacacaccgtgaacgccagttggattgcagttcaggagctagaaaagctaggccttggcgacagcgtggacctgcatgtgtacgagattccggttgagtaccaaacagtccagagactcatccccgccctgtgggagaagcacagtccacagctggtggtgcatgtgggggtgtcaggcatggcgaccacagtcacactggagaaatgtggacacaacaagggctacaaggggctggacaactgccgcttttgccccggctcccagtgctgcgtggaggacgggcctgaaagcattgactccatcatcgacatggatgctgtgtgcaagcgagtcaccacgttgggcctggatgtgtcggtgaccatctcgcaggatgccggcagatatctctgcgactttacctactacacctctttgtaccagagtcacggtcgatcagccttcgtccacgtgcccccactggggaagccgtacaacgcggaccagctgggcagggcactgagagccatcattgaggagatgttggacctcctggagcagtcagagggcaaaatcaactattgccacaaacactgagggacgctcaggtctcctaagacctcatcctgctggggaccccacgaggggacatccaccctctggggtgtggccaggaaaagacaagctcttcagcttggggatccgatctggaagagagattctgatctgcccacctcctcttccttcttctctacaaaagctccggttgattcgagggaagtggtgaaaatttttttttctcccattttcctccctgcatctggggacacagctgccgtgaccagggaggccagcctgggaggtccagatgcccagggagaatcttggtctggtgaatccatgagctgagataccacggctggggccatatgttcacctgctttcctgtccgttggtgaaggaatttcagaattcattttatatccaagactggcttttaccaaatttaaaagcctctcaatgcgtcctcgaccttgaactgtgctcaacagcctggccctttctggggccaccctgggatatggctggctggctggctggctttctttctttctttctttctttctttctttctttctttctttctttctttctttcttgctttctttcttgctttctttcttgctttctttctttcttgctttctttcttctctctctctcttttttttttttttaaatagtgctagtttgggcacagagtaatttatattccctttggttaaaatgcaggctttttagccaacaacaaaagtgttttccccccacccccactcgcccaccagggtgatgccacttttgcctcctgccctgaaaattggacttaagatgccatgtcttggctgggattacaggcatgagccactgcacccagcccagttctttcttaaaacagctgagagttttgttttcttcagcgttcaccttccttgtctccagttccgatgctggcagtggttcctacctctgttgggtttctagatagtttgggaacggggttgatgggtttctgtgaaacacattttccaagtcttgggctttctctggaggggaaggtggatgctggcgggtgacttgcagtgggcgcctggcagtgggtgtggactgtaactgacaggtggaaatgagtaggggcactattgttccctccatgccagctttttttttgctggaaatgccccctccacacccctggtagctctgtgtcctgagaaatccagagtgtgggagacatcactgcatctgtccccccagcttctgtgaagggaagctgtggcctcttttgaatgtggggaacaactgaagactcaggggtcacccagaggtctggtggaaagcaacttcaggtttcatcttgctctattcctcaaaggtctggtctgtgggcctctgaggagaaaacaggtctagccaagacagggacaaaatggggaagggggtgtgccaggcctgaactgagctaagcacctgccccgggctccacacttccatctttcttttgtcttcatttcacctctgtgtttaaagcactgtgtgacatagctccttagagatataacctattgtctgctcattgtcaaaaaaaaaaaaaaaaaaaaaaaaaa

SEQ ID NO: 407 - DNA, 60 bp, Homo sapiens
tttaaagcactgtgtgacatagctccttagagatataacctattgtctgctcattgtcaa

SEQ ID NO: 408 - DNA, 3434 bp, Homo sapiens
agtccccacagctgcgccggtgactgaggggccgggcagtggagaagtggtggcggcgggcggcgggcggcaaaggagcagccatgagggccgggcccagtcaccgaccgtgctgaggagtcatggaagagtttttaaaccagtgtgagccactgccccatgttgtgttgatgccaatctgccatgctagcctgtctaccagggccaggtgacctgtcctttcagcctctttctcacacgcagatgaacactggacttcagaaatgggacactacacagaaaatgagaactgctcactatcctaccccagccgaattggatgcgtatgctaagaaggtcgcaaacaacccactgactataaaaatcttccccaacagtgtgaaggttccccagcggaaacacgttcgtcgtactgtgaacggcctcgacacatcagcccagcgctacagcccctacccgacacaggctgccaccaaggcaggcctgcttgccattgtcaaagtgccagccaaaagcatactcaaggactttgacggcacccgagcccggttgctccctgaggccatcatgaaccccccagtggcaccctatgctactgtggcacccagcactttagcccacccccaggcccaggctctggcccgccagcaggccctgcagcatgcacagaccctggcccatgcccctccccagacgctgcagcaccctcagggtatcccgccaccccaggcactgtcccaccctcagagcctccagcagcctcagggcctgggccaccctcagcccatggcccaaacccagggcttggtccaccctcaggccctggctcaccagggtctccagcacccccacaatcccttgctgcatggaggccggaagatgccagactcagatgcccccccgaatgtgaccgtgtctacctcaactatccccctttcaatggcggccactctgcagcacagccggcctccggacctgagtagcatcgtgcaccagatcaaccagttttgccagacgagggcaggcatcagcactacctcagtgtgtgagggccagatcgccaaccccagccccattagtcgcagtctgctcatcaatgcaagcacccgggtgtcgacccacagcgtccccacaccaatgccttcatgtgtggtcaatcccatggagcacacccacgcggccaccgccgcgttgcctgctgcaggtcctgtcaacctgcccacaggcatctctcgcgtccccactggctaccctagcgacctcaagccagtcacctggaaccagcaccagctggcccacctacagcagatgtgcagcgaggctagtgggacgccagcccctggcctgacaggcaagcatgcggcaggacgcgagttggcagggcctggctttgtgggcaaggcccctgcctacccgcaggaactctgcctggcgcagtccttccatctgaagccacccctggaaaagccgaccccatccccaccagtcaacggcatggcagccccattggcctaccccaatggtcactacttccaacccctgtggaacaacattctgcccactcccaatagcgacagctcggggtctcaggaccttgccatgccgttccacggtgggcagcccacaggtgcacccctcgactgtgcggcagctcccggggcccactaccgagcagggaccgggggcggtccagtggcaagccagaacagcttgatgcaaacagtggattacctaagtggggatttccaacaggcctgcttccgagaacagagcctggccatgctgagcaaggcccaccgagcccctggcaaccgagcccccgatcccacagagagtcgaagtcttcatattctgcacccagggtatagataggtagccctgctgccctccacgtgcaacacatcatacatcaccctcctaggtttagtcttttaagtaactggatagtttcaaagtttcactgctccagtgtgatcattcttagatgtctaagaaagggaatttggtgggatctaagtggggacagaaggggtcctctcgtcctcccctccagcaacttttggttttatgttagaacctaaccctaagcccaggcttttctctccactgactgcctgtcagctagtctctccaccttggccatttccagccagctcccacccatcttttcttgaatctcttcctgtttcccttaggacgactgaggtgtgggctgacggaatgccctagttgaggtagtataggtgctcaggcccctaatccagacctctacctgttgctaccccccttcccctccctccaggactaagaagcaagatttcccaggtgctctgaaagctaattacttactcatcggaggatctcaaatcaaagctgacccagtcttcatatccttcaagttcctttccattcctcaaggctttgttttgtgtctatattgatcccacagccactgcacttgcccttgccacacttgatctcaagggcatcttggaagtatttgaccatttcttgagatatggggggaaaaagtctttgtattggcatcttggttccagactcccctttccaaacctagaaaaatacagtgacctttgagcatacccaagatccctttctcactgttgcctgtcccctaactcacctccccacagcccctatcctttccccctcaacaaaaacaaaatctaccttacttgaggaattaggtaggtaaggaatgatcacattggagtttgggattaaaaacaccaaaaaaaaaaaaatgcatttggttctctctacactggctaagaatattgctctacactgtaagttttaaacgttacgtttctgtatgaatgtagtgtgggtttgagtagcattgtgtgtgagtggccccacaggtagattcaccctctagtgcagcccctcagtttaatgaaggaaaaaaaaaacaaacacaaagccttaagctctttgagtacttcctttaccaaatgagcatggttctaacacctggagctgggcctacattggaaacaagcccctcctgccctctgtccattcttagagcataccttcatccactccatgctcagcacgtctcatcccaagcgacaattagttggctagaaacacttttctgtaattttaaacttagactgttttgttacaaatttttgcaccattctgttaaagatgcagaattgggcttttttattttttacagatgaaataagcccttacctttcctcttgtctctggggaatgtcagctgatggttcttatttaaggttttgcattttgttcactatccactactgttcgttagccagaaattctctagtgatctgaagcaatgtgactgaagaccagttttaagttatgtgttggcaagttgccttatatttaaaaggaaaaagaaaaaaaaaaaagcctgattgtgttatgcc

SEQ ID NO: 409 - DNA, 60 bp, Homo sapiens
aatacctggattccccattctatccacatactgtagcattcattctccatctctctcacc

SEQ ID NO: 410 - DNA, 1665 bp, Homo sapiens
tggggcactggtacctccaggacctggagtgtactggaagaaatggtgcagtccagatgcatcactgtaagcgataccgctcccctgaaccagacccgtacctgagctaccgatggaagaggaggaggtcctacagtcgggaacatgaagggagactgcgatacccgtcccgaagggagcctcccccacgaagatctcggtccagaagccatgaccgcctgccctaccagaggaggtaccgggagcgccgtgacagcgatacataccggtgtgaagagcggagcccatcctttggagaggactactatggaccttcacgttctcgtcatcgtcggcgatcgcgggagagggggccataccggacccgcaagcatgcccaccactgccacaaacgccgcaccaggtcttgtagcagcgcctcctcgatgagattgtggggaacctgggtgaaggcacctttggcaaggtggtggagtgcttggaccatgccagagggaagtctcaggttgccctgaagatcatccgcaacgtgggcaagtaccgggaggctgcccggctagaaatcaacgtgctcaaaaaaatcaaggagaaggacaaagaaaacaagttcctgtgtgtcttgatgtctgactggttcaacttccacggtcacatgtgcatcgcctttgagctcctgggcaagaacacctttgagttcctgaaggagaataacttccagccttaccccctaccacatgtccggcacatggcctaccagctctgccacgcccttagatttctgcatgagaatcagctgacccatacagacttgaaacctgagaacatcctgtttgtgaattctgagtttgaaaccctctacaatgagcacaagagctgtgaggagaagtcagtgaagaacaccagcatccgagtggctgactttggcagtgccacatttgaccatgagcaccacaccaccattgtggccacccgtcactatcgcccgcctgaggtgatccttgagctgggctgggcacagccctgtgacgtctggagcattggctgcattctctttgagtactaccggggcttcacactcttccagacccacgaaaaccgagagcacctggtgatgatggagaagatcctagggcccatcccatcacacatgatccaccgtaccaggaagcagaaatatttctacaaagggggcctagtttgggatgagaacagctctgacggccggtatgtgaaggagaactgcaaacctctgaagagttacatgctccaagactccctggagcacgtgcagctgtttgacctgatgaggaggatgttagaatttgaccctgcccagcgcatcacactggccgaggccctgctgcaccccttctttgctggcctgacccctgaggagcggtccttccacaccagccgcaacccaagcagatgacaggcacaggccaccgcatgaggagatggagggcgggactgggccgcccagccccttgactccagcctcgaccgccagccccaggccagagccacccaatgaacagtgcaatgtgaaggaaggcaggagcctgcaggggagcagacttggtgcccagctgccagaaagcacagatttgacccaagctatttatatgttataaagttataataaagtgtttcttactgtttgta

SEQ ID NO: 411 - DNA, 60 bp, Homo sapiens
gtgcccagctgccagaaagcacagatttgacccaagctatttatatgttataaagttata

SEQ ID NO: 412 - DNA, 4076 bp, Homo sapiens
tagcaggttgctactgccccgaacccgcgctgcagggaacagcggggcaaacagtgagtggggttcagcgtagactctggaccaggagaggcccgcggtgaccgaggcctgggccccggaaaccaatagagccatggcgactccctctgctgccttcgaggcccttatgaatggtgtgacaagctgggatgtacccgaagatgctgttccatgtgaactgcttcttattggagaggcttcatttcctgtgatggtgaatgacatgggccaggtcctcattgctgcctcctcctatggccgtggccgcctggtggtcgtgtcccatgaggactacttggtggaagcccagctcacgccctttctcctgaacgcagtggggtggctttgctcttcccctggggctcccattggtgtacacccatccctggcacctttggccaaaatcctcgagggctctggagtggatgcaaaggttgagccagaagtgaaagactccctgggggtttactgtattgatgcctacaatgaaaccatgacagaaaagctggtcaagttcatgaaatgtggtggcggcttgctcataggaggacaagcctgggattgggccaaccagggggaggatgaaagggttctgttcacgttccctgggaacctcgtgaccagtgtggctggcatttactttactgacaacaaaggggacacgagtttctttaaagtctccaagaagatgcccaagatcccagtgttggttagttgtgaagatgacctctccgacgacagagaagagcttctgcatgggatttcagagctggacatcagcaactcggattgtttcccatcccagctgctagtgcatggggctttagcctttcctctagggttagattcctaccatggctgtgttatagcggctgcccgctatggccggggccgggtggttgtgactggccataaggtattattcactgttggtaaactgggcccctttctgctcaatgctgtccgctggctggatgggggccgcagaggcaagattgtggtgcagacagagctgagaaccctgagtggcctcctcgcagtggggggcatagacaccagcatcgagcccaatctgaccagtgatgcaagtgtctactgctttgaacccgtgagtgaagtgggggtcaaggaactgcaggagtttgtagcagagggtggcgggctatttgttggagcccaagcctggtggtgggccttcaagaaccccggagtgtcccctttggctcgattcccaggaaacctcctcctcaacccctttggcatcagcattacaagccaaagcctcaatccagggccctttcgtactcctaaagcagggataaggacctatcacttccgctccaccttggccgagttccaggttataatgggcaggaagagaggaaatgtggaaaagggctggttggcaaagctgggaccagatggtgcagctttcctgcagattcccgcagaagagatccctgcctacatgtctgtgcatcgactcctgaggaagctgctaagtcgatatcggcttccagtagcaacccgagagaaccctgttatcaatgactgctgcagaggtgctatgctttccctggccacagggctggcccactctggaagcgacctctctctgttagtcccagaaattgaagatatgtacagcagcccctatctgcgcccctcagaatctcctatcaccgtcgaggtcaactgcaccaatccaggcaccagatattgctggatgagtactgggctctacatacctggaaggcaaattatagaagtctcactgcctgaagctgctgcctctgccgacctgaagatacagattggctgccacacagatgacctgaccagggccagcaagcttttccgaggcccactcgtaattaaccggtgctgcttggacaaacccacaaaatcgatcacgtgcctctggggtggactcctctatataattgtgcctcagaacagcaaactgggttctgtgcctgtcaccgtgaagggggctgtgcatgctccatactacaagctgggggagaccaccctggaggagtggaagaggcgtatccaggagaatccagggccctggggagagctggccacggacaacatcattctgaccgtgccgaccgcaaatcttcgtactctggagaaccctgagccgctgctccgcctctgggatgaggtgatgcaggctgtggcgcgactgggagctgagcccttccctttgcgcctgcctcagaggattgttgccgacgtgcagatctcagtgggctggatgcatgcagggtaccccatcatgtgccatctggagtcagtgcaggagctcatcaacgagaagctcatcagaaccaaggggctgtggggccccgtccatgagctgggccgcaaccagcagcggcaggagtgggagttcccaccacacaccaccgaggccacctgcaacctgtggtgtgtgtatgtgcatgagacggtcttgggcattcctcgaagccgtgccaatattgctctgtggcccccagttcgggagaagagagtcagaatctacctgagcaagggtcccaatgtgaaaaactggaatgcatggaccgcactggaaacgtatttacagctccaggaagcctttggttgggagccattcatccgtctcttcaccgagtacaggaaccagaccaacttgcccacagaaaatgttgacaaaatgaatctgtgggtcaagatgttctcccaccaagtgcagaagaacctggctccgttctttgaggcctgggcctggcccatccagaaggaagtggctaccagcctggcctatctgcctgaatggaaggaaaatattatgaaattgtacctcctcacacagatgccccactgaaattgaagtcaagaaatgcaaaaaggaactgacacatctcagcaaagaaaactgaagggatttggttataagtggagaggatctcagcatatttctggaagatagaaagtggatgaagcatgataatgaaagagtgaagaacctttcagataaaatgtaagctgatctgaacaacataaccccaaagagacttgcgcacctgaaaagcttgtctactgaagaattactccagttgtaagattgagccctctcctactctcccccaactcttatgcacagaacacaggcagtctccactattgataccagttaaaaatttcttgttattgttgctgttgttgtttgtataaaggaattgaacaggctgcttgcagagagataagagttggtgctccagaaaaaaatttctcttctagtggaaataagtgcccctacccccagccggtcagctaattctctactgacagctgagacctcctactcaagtgcctgttgccttcaggtatagaagaggtttcctgaagaaacagacctaactgtacaacagcagaggaaacccatgccaactgttatacaagttaacagttatgttgattcttaaatgggaatggtgagttagaaattcccagacatgggcgatggggagggaagaggaataagaaaagttacgaggtagaattaggggccttgaaaatatgacaaactctgagggaaacaaagacaatgtggaaagaataacttaattttaattccatctccagagagatttgaggtgtatttaagatgaaaaacaggatactacaaagaaacggaaaactcaggagttcaagaccagcctaggcaagatggcaacatcccgtctctacaaaataatttttaaaaattagccaagcatggtggcatgtgcctgtggtcctagctacttgggaggctgaagtgggaagatcacttgagcccaggagttcaaggcttcagtgagccatgatggtgccactgcactccagcctgggggacagagtgagaccctgtctcttaaaaagcaagaaaagaaagagaagactgagaataagaagatctctttgaaaataaaataagactgctaaaagtatttggtatacagtctggaaaataaagttgagggaatctctccagataaagagcaaaaagaaatagatag

SEQ ID NO: 413 - DNA, 60 bp, Homo sapiens
ataagactgctaaaagtatttggtatacagtctggaaaataaagttgagggaatctctcc

SEQ ID NO: 414 - DNA, 4915 bp, Homo sapiens
gcatgattccagcagggggccgagcccctgggcccccctacagccctgttcctgcagaatcagaaagtctggtaaatgggaaccacaccccacagactgcaacacggggaccctctgcctgtgccagccacagttccctggtgagctctattgagaaggacctgcaagagatcatggactcactggtgctagaggagcctggagctgctggcaagaagcctgccgcaacctctccactgtcaccgatggctaatggtgggcgctacctgctgtctcccccaaccagccccggcgccatgtctgtgggctccagctatgagaacacctctccagccttctctccactctcttcaccagccagcagtggaagctgtgccagtcactcacccagtgggcaagagccaggaccttctgtgcccccgctggtacctgcccgttcctccagctaccatctggccctacagcccccacagtcccgcccaagtggtgctcgctccgagagtcctcggctgagcaggaaagggggccatgagaggcctcccagccctggcctccggggtctgctgacagacagccctgcagctactgtcttggcggaggcccggagagccactgagagcccccggctgggtgggcagctgcctgtggtggccatcagcctgagtgaatacccagcttctggtgctctcagtcaacccaccagcattcctggcagccccaagtttcagcctccagtccctgctccccgaaacaagattggcacactccaggaccgccctcccagccctttccgtgagcctccaggcagtgagcgggtgctaacaaccagcccctcacgccaactggtgggccgaacattttcagatgggttagccacccgtaccctgcagcctcctgagagtccccgcctgggccggcggggcctggacagtatgcgagaactaccccccttaagtccatctctgtcccggcgagctctctccccgctgcccacccggaccaccccagatcccaagctaaacagggaagtggcagagagtcctcggccccggcgctgggcagcccatggggcttcaccagaggacttctccctgacgctgggggcacggggccgtaggacacggagcccctcacccacactgggtgagtctctggcaccccacaagggcagcttcagtggcaggctgagcccagcctacagtctgggctctcttactggggcttcaccctgccagagtccctgtgtccagaggaagctctccagcggggacttgcgggtgcctgtcacaagggagcggaaaaatagcatcacagagatcagtgacaatgaggacgacctcctggagtaccaccggcgacagcgccaagagcggctccgggagcaggagatggagaggctggaacgccagcgcctggagaccatcctgaacctgtgtgccgaatacagccgggctgatgggggacctgaggctggggagcttcccagcattggggaggccaccgcagcattggcactggcaggccggaggccctcacgaggccttgcaggggcctctgggcggagcagcgaggagcctggcgttgccacccaacgcctatgggagagtatggagcgctcagatgaggaaaatctcaaggaggagtgcagcagcactgagagcacccagcaggagcacgaagatgcacctagcaccaagctccagggagaggtgctagccctggaagaagagcgggctcaggtgctggggcacgtggagcagctcaaggtccgtgtgaaggagctagagcagcagctgcaggagtcagcccgagaggccgaaatggagcgggcactgctgcagggagagagggaggcagagcgggcactgctgcagaaggagcagaaggcagtggatcagctgcaggagaagctggtggccttggagacaggcatccagaaggagagggacaaggaggcagaggccctggagactgagacaaagctctttgaggacttggagttccagcagttggagcgggagagccgcgtggaggaggagcgcgagctggccggccaggggctgctccggagcaaggctgagctgctccgcagcatcgccaagaggaaggagcgcctggccatcctggacagtcaggctgggcagatccgggctcaggccgtgcaggagtcagaacgcctggcccgggacaagaatgcctccttacagctgctgcaaaaggagaaggagaagctgactgtgctggaaaggagataccactcactcacagggggcaggcctttcccgaagaccacatcgaccctcaaagagatggagaagctgctgctccctgctgtagacttagagcagtggtaccaggagctgatggccgggctggggactggccccgctgcagcctcccctcactcttctcccccgcctctgcccgccaaagcttcccgtcagctgcaggtttaccgctccaagatggatggcgaggccaccagcccccttccccggacccgcagcggccccctcccctcctcctctggctcttcctcctcctcctcccagctcagcgtggctaccctggggcgtagcccctccccaaagagcgctctactcacccagaatggcacgggcagccttcctcgcaacctggcagccacactgcaggacatcgagaccaagcgccaactagctctgcagcagaagggacaacaagtgattgaagagcagcggcggcgactggctgagctgaagcagaaagcggcagctgaggcacagtgccagtgggatgcccttcacggggcagcacccttcccagcgggcccctcgggcttcccccctctcatgcaccactctatcctacaccacctgcctgcggggcgggagcgtggggaggagggtgagcacgcctatgatacgctgagtctggagagctctgacagcatggagaccagcatctccaccgggggcaactcggcctgctcccctgacaacatgtccagcgcgagtggtctggacatggggaagatcgaggagatggagaagatgctgaaagaggctcatgcagagaagaaccggctcatggagtcgagggagcgggagatggagctgcggcggcaggccctggaggaggagcggcggaggcgtgagcaggtagaacggaggctgcagagtgagagtgcccggaggcagcagctggtcgagaaggaggtcaagatgcgggagaaacaattttcccaggcacgacccctgacccgctacctgccaatccggaaggaggactttgacctgaagacacatattgagtcatcgggccatggtgttgatacctgcctgcacgtggtgctcagcagcaaggtctgccgtggctacttggtcaagatgggcggcaagattaaatcatggaagaagcgctggtttgtcttcgaccggctcaagcgcaccctttcctattatgtggacaagcatgagacgaagctgaagggagtcatctatttccaggccattgaggaagtgtactacgaccacctgcgcagtgcagccaagaagaggtttttccgcttcactatggtgactgagagcccgaacccagccctcaccttctgcgtaaagacccatgaccggctgtactacatggtggccccatctgcagaggccatgcgtatctggatggatgtcattgtcacaggggctgagggctacactcagttcatgaactaactgtcgtgggcctcctggcagagcacaactggggcttttgtataagaagactttaatattctgtaaggagcttggtcctgtgagtttctgggctctggcctcctgaagaaccagccagaagaagaaaagtagaggtggctttgctgcctcctgggagcccagaacttgcagtaaccctttagggtcctgccccaggcccagccagggctgaggagctgtcacagagagggcctcagctctgacctgacacctgctctccccagcctgttttctcttttctaaaagacaaattatggtaccataagctgccaaagatcccctcctgcctcagacccctttgccaggggctttgggggctgagcagagccacatccagagtggggtaatagctcaggcggcccgcttcccatttctcaaaccccgctctgccccattgttctcctttcccttatactttttattaccttgctcaagggccagagatctcaagtgtcaaccttgaggtcccagctccatcccctagttgcagactcatcaccatggttaccatagtgactgcttcattgccatggttacatactaattgctgcagctctgtggcccagcccactgcttcagctgtgggccatctgagggtacgtgccatcatctctccagcccaggcccctgggcatctcatgctggggggaagggactgaatacctttttccttccccctgcctgtgtcttcagccctgatgcacaggctgccagccccccagtccagccctctcccttccactggtgccttgcttagagccagaagggatgaagccgggggatctatggaacagaggaggagcgatgcagttgggagaggaagctagaagggttatggttggagttctgtacagtgttgagtttccgacagggaaagaggattcctccaatgcgcctagagagaaagcctgagcaggagatgatgcagcagaggggaagggccctgtggtgccgccgcccttccttcagcctccgaagggtgatggaaatggagagtggaggaccaggcctccagctgtctggcctcgcccttcacgccttaacactaagcccacctcccctgctctccttcccagcattgagcccttggttgcctgggcccaggctgggggttttcagtatttgtaagcatttcagcagaacaataaagcctttggactacggaagtg

SEQ ID NO: 415 - DNA, 60 bp, Homo sapiens
ctgggggttttcagtatttgtaagcatttcagcagaacaataaagcctttggactacgga

SEQ ID NO: 416 - DNA, 2074 bp, Homo sapiens
cacaaggcggtagccatggcggaggcggcggctgcagcgggtgggactggcttgggcgcgggcgcgagctacgggtctgcagcggaccgggaccgggacccggacccggaccgcgccgggcggaggctgcgggttctctctggccatctgctgggccggccccgggaggctctgagtaccaatgagtgcaaagcgcggagagccgcgtcggcggccacggcagcgcccacggccactcccgccgcgcaggagtcgggcaccatcccaaagaagcggcaagaagttatgaaatggaatggatggggatataatgattctaaattcatcttcaataagaagggccaaattgaattgactgggaaaaggtaccctcttagtggcatgggtttaccaacatttaaagaatggatccaaaatacccttggagtaaatgtggagcataaaactacctctaaagcatccttaaatcctagtgatacacctccttctgttgtaaatgaagattttcttcatgaccttaaagaaactaatatttcatattcacaagaggcagatgatcgagtatttagagctcatggtcattgtcttcatgagatatttttgctcagggaaggaatgtttgagcgaattcctgatatagttttatggccaacatgccatgatgatgtagttaagattgtgaatctagcttgcaaatataatctttgtatcataccaattggtggaggaacaagtgtttcatatggcctgatgtgtcctgcagatgagacaagaacaattatttctttggacacttcacaaatgaatcgaattctctgggttgatgagaacaatttgacagctcatgtggaggctggcataacaggacaagagttggaaagacagcttaaagaaagtggttattgtacaggtcatgaaccagattccctggagttcagtactgtaggaggatgggtatctactcgcgcatcaggcatgaagaagaatatctatggcaatatcgaggacctggtggttcatataaaaatggtaacacctagaggtataatagaaaaaagctgtcaaggacctcgtatgtcaacaggccctgatatccatcacttcatcatgggatctgaaggaactcttggtgtaataacagaagctacaataaaaatcagaccagtccctgaataccaaaagtatggctcagtagctttccctaattttgaacaaggagtagcctgtttaagagaaattgcaaaacagagatgtgctccggcatctattcgcctcatggacaacaagcagtttcagtttggtcatgctcttaaacctcaggtttcctctatctttacatcatttttggacggattaaaaaagttttatattacaaagtttaaaggatttgacccaaatcagctaagtgtagccacattactgtttgagggggatcgtgagaaggttcttcaacatgaaaaacaagtgtatgatattgctgcaaaatttggtgggttggcagctggagaagataatggacagagaggttatttgctgacctatgttattgcatacattcgagacttggctttggaatactatgtattaggagaatcttttgagacttctgctccttgggacagggtggtagatctctgtagaaatgtaaaagaaagaataacaagggaatgcaaagagaagggtgttcagtttgctcctttttctacatgcagggtgacgcagacttacgatgcaggtgcttgtatctacttctattttgcctttaactacaggggaattagtgacccactgaccgtatttgaacaaactgaggcagctgctagagaagaaatccttgctaatggagggagcctgtcacatcaccatggagtgggcaagttacggaagcaatggctaaaggaaagtatctctgatgtcggctttgggatgctgaagtctgtcaaggaatatgtggaccccaataacatctttggaaacagaaaccttttataaatccattagtaccattacaaaaaaatgtcaattttttttttaagttttcaactgtggttatactagtaatcaaatatatcat

SEQ ID NO: 417 - DNA, 60 bp, Homo sapiens
tggagaagataatggacagagaggttatttgctgacctatgttattgcatacattcgaga

SEQ ID NO: 418 - DNA, 1812 bp, Homo sapiens
tgggaccatggcctcggagaagccgctggcggcagtcacttgtacagcgccggtcaacatcgcggtcatcaagtactggggcaagcgcgatgaagagctggttctgcccatcaactcctccctgagcgtcactctgcaccaggaccagttaaaaaccaccacaacagccgtcatcagcaaggacttcaccgaggaccggatttggctgaatggccgggaggaggatgtggggcagccgaggctgcaggcctgcctgcgggagatccgctgcctggcccggaagcggaggaactcacgggatggggacccgctgccctccagcctcagctgcaaggtgcacgtggcatcggtgaacaacttccccacggctgcgggcctggcctcctcagcggcgggctatgcctgcctagcctacaccctggcccgtgtctacggcgtggagagtgacctctcagaagtggctcgccggggctcaggcagcgcctgccggagcctgtatgggggctttgtggagtggcagatgggagagcaggccgacgggaaggacagcatcgctcggcaagtggcccccgagtcacactggcctgaactccgcgtgctcatccttgtggtgagcgctgagaagaagctgacaggcagtaccgtgggcatgcgggccagtgtggagaccagccccctgcttcggttccgggccgagtccgtggtgcccgcgcgcatggcggagatggcccgctgcatccgggagcgagacttccccagcttcgcccagctgaccatgaaggacagcaaccagttccacgccacctgcctcgacaccttcccgcccatctcttacctcaatgccatctcctggcgcatcatccacctggtgcaccgcttcaacgcccaccacggggacaccaaggtggcgtacacctttgacgcgggccccaatgccgtgatcttcaccctggacgacactgtggctgagtttgtggctgctgtgtggcacggctttcccccaggctcgaatggagacacgtttctgaaggggctgcaggtgaggccggcccctctctcagctgagcttcaggctgcgctggccatggagccgacccccggtggggtcaaatacatcattgtcactcaggtggggccagggcctcaaatcctggatgacccctgcgcccacctcctgggtcctgacggcctgccgaagccagctgcctgactgcctcagcagggaccgcatgccgcttggagaaggggtggcctcgccggagctagggagcggatgtggtgggctggccggactcctgggacatgtgggtggtggcttgaccccgggcccatgggcagcttgctgtggggcagtgcagggagtcctgcggccgcccaggtgtcaggagaggtccccgccgagtgcttcagctgccctaagctgcaccagcgctttgccaagatgggatggggagggggtatgagaactggcagagcctcggtgcagcagggctgaagggctttctcaccccagctctggctatgcccagttctctgagaaaggagctcagtggggaggtggtccctccagcggaccagggaaggggtcactgtgctgggagcagcctccttgggcctcaggaaaccaccaagtgcctcggatggtggctgcccacggcgcttctgctgagaccctgcccccggcccaggtgtctcggagggtggctgcccacggcctgggtgtggctggaatggtggcaggagtgggcaccagtgcggccccggtggccatggggaataaaccagcattgctgccaaaaaaaaaaaaaaaaa

SEQ ID NO: 419 - DNA, 60 bp, Homo sapiens
tgaagggctttctcaccccagctctggctatgcccagttctctgagaaaggagctcagtg

SEQ ID NO: 420 - DNA, 2080 bp, Homo sapiens
ggcacgagggtaaaggcctccgtgttccgtttcctgccgccctcctccgtagccttgcctagtgtaggagccccgaggcctccgtcctcttcccagaggtgtcggggcttggccccagcctccatcttcgtctctcaggatggcgagtagcagcggctccaaggctgaattcattgtcggagggaaatataaactggtacggaagatcgggtctggctccttcggggacatctatttggcgatcaacatcaccaacggcgaggaagtggcagtgaagctagaatctcagaaggccaggcatccccagttgctgtacgagagcaagctctataagattcttcaaggtggggttggcatcccccacatacggtggtatggtcaggaaaaagactacaatgtactagtcatggatcttctgggacctagcctcgaagacctcttcaatttctgttcaagaaggttcacaatgaaaactgtacttatgttagctgaccagatgatcagtagaattgaatatgtgcatacaaagaattttatacacagagacattaaaccagataacttcctaatgggtattgggcgtcactgtaataagttattccttattgattttggtttggccaaaaagtacagagacaacaggacaaggcaacacataccatacagagaagataaaaacctcactggcactgcccgatatgctagcatcaatgcacatcttggtattgagcagagtcgccgagatgacatggaatcattaggatatgttttgatgtattttaatagaaccagcctgccatggcaagggctaaaggctgcaacaaagaaaaaaaaatatgaaaagattagtgaaaagaagatgtccacgcctgttgaagttttatgtaaggggtttcctgcagaatttgcgatgtacttaaactattgtcgtgggctacgctttgaggaagccccagattacatgtatctgaggcagctattccgcattcttttcaggaccctgaaccatcaatatgactacacatttgattggacaatgttaaagcagaaagcagcacagcaggcagcctcttccagtgggcagggtcagcaggcccaaacccccacaggcaagcaaactgacaaaaccaagagtaacatgaaaggtttctaagcatgaattgaggaacagaagaagcagagcagatgatcggagcagcatttgtttctccccaaatctagaaattttagttcatatgtacactagccagtggttgtggacaaccatttacttggtgtaaagaacttaatttcagtataaactgactctgggcagcattggtgatgctgtatcctgagttgtagcctctgtaattgtgaatattaactgagatagtgaaacatggtgtccggttttctattgcattttttcaagtggaaaagttaactaaatggttgacacacaaaaattggtggagaaattgtgcatatgccaatttttttgttaaaaccttttgttttgaactatactgctttgagatctcatttcagaagaacggcatgaacagtcttcagccacagttgtgatggttgttaaatgctcacaattgtgcattcttagggtttttccatccctggggtttgcaagttgttcacttaaaacattcttaaaatggttggcttcttgtctgcaagccagctgatatggtagcaaccaaagattccagtgtttgagcatatgaaagactctgcctgcttaattgtgctagaaataacagcatctaaagtgaagacttaagaaaaacttagtgactactagattatccttaggactctgcattaactctataatgttcttggtattaaaaaaaaagcatatttgtcacagaaatttagttaacatcttacaactgaacatgtatgtatgttgcttagataaatgtaatcactgtaaacatctatatgatctgggattttgtttttattttgaaatgggagcttttttgtttacaagttcattaaaaactaaaaactgtttctgtaaaaaaaaaaaaaaaaaaaaaaaaaaaaaaaaaaaaaaaaaaaaaaaaaaaaaaaaaaa

SEQ ID NO: 421 - DNA, 60 bp, Homo sapiens
tcgccgagatgacatggaatcattaggatatgttttgatgtattttaatagaaccagcct

SEQ ID NO: 422 - DNA, 917 bp, Homo sapiens
tgatgccctatgtattctccttcaaaatgcctcaagagcaaggacagatgtttcaatactatccagtttacatggtcctaccctgggaacaacctcagcaaacagttccaaggtcacctcaacaaacaagacagcaacagtatgaggagcagataccattctatgctcaatttggatacattccacaactagcagaacctgctatatcaggaggacagcagcaactagcttttgatccccaactaggcacagctcctgaaattgctgtgatgtcaacaggagaagagataccatatttacaaaaagaagcgatcaactttagacatgacagtgcaggagttttcatgccctcaacttcaccaaaacccagcacaaccaatgttttcacttctgctgtagaccaaactattaccccagagctcccagaagagaaggacaagactgacagcctaagggaaccataagaagttgccctgatcattcagacattttgggaaaaagatgtggccatgccttggatataattttaggctattagcttcctcaatactagtatcagttctttggaatacatgaaatatcttgactcttctcctaaatttgtttttacttatacatgttattaaactctttaaatatgtcatagaaaataatacaatcatgtaatgagtcttgtcttacaaaattatatgtctcttcaaatatcctatcattgtataatatggaatataataacacagaataaagctagtatcattaaatcaattggataattgcattagtaaatgatgcctctgcaaaatggtagtacccatgaagatatgtatattgtcattggatgtatgatgagtgttgtgattggaactgatgaagtaaaataagtatctaaaaaaaaaaaaaaaaaaaaaaaaaaaaaa

SEQ ID NO: 423 - DNA, 60 bp, Homo sapiens
acagcctaagggaaccataagaagttgccctgatcattcagacattttgggaaaaagatg

SEQ ID NO: 424 - DNA, 4602 bp, Homo sapiens
ggggaagatggcggctgctcctttggaggagcgggattgagaggatcggggtggggagaccaaacaagagagacatttctggctctgaaggcgaacgcttcgctggccatttaggagctctgctcaaagccagacgtatcctagaaggaaaacatcaccatggctacagaaattggttctcctcctcgttttttccatatgccaaggttccagcaccaggcacctcgacagctgttttataagcgacctgattttgcacaacagcaagcaatgcaacagcttacttttgatggaaaacgaatgagaaaagctgtgaaccgaaaaaccatagactacaatccatctgtaattaagtatttggagaacagaatatggcaaagagaccagagagatatgcgggcaattcagcctgatgcaggttattacaatgatctggtcccacctataggaatgttgaataatcctatgaatgcagtaacaacaaaatttgttcggacatcaacaaataaagtaaagtgtcctgtatttgttgttaggtggactccagaaggaagacgcttggtcactggagcttctagtggggagtttaccctgtggaatggactcactttcaattttgaaacaatattacaggctcacgacagcccagtgagggccatgacgtggtcacataatgacatgtggatgttgacagcagaccacggaggatatgtgaaatattggcagtcgaacatgaacaacgtcaagatgttccaggcacataaggaggcgattagagaggccagtttctcacccacggataataaatttgctacatgctctgatgacggcactgttagaatctgggactttcttcgttgccatgaggaaagaattctccgagggcatggtgctgatgtgaaatgtgtagactggcatccaaccaaagggttagttgtttcaggaagtaaagatagtcaacagccaatcaagttctgggatcccaagactgggcagagtcttgcaacacttcatgcccataaaaacacagtaatggaagtgaaattaaacctcaatggcaattggctactcacagcatcacgtgatcatctctgtaaactttttgatatcagaaacctaaaagaagagcttcaagtcttccgaggtcataagaaagaagccacagctgtggcctggcatcctgttcatgaaggactttttgccagtggagggtctgatggttctttgttattctggcatgttggggtagagaaggaagtgggtgggatggagatggctcacgaagggatgatctggagtctggcttggcatcctcttgggcatattctctgctcaggctcaaatgaccatactagcaaattctggactcgaaaccgaccaggtgataaaatgcgagatcgatataatctaaaccttttacctggaatgtctgaagatggagtagaatatgatgacctcgaacctaatagcctggcagtaattccaggaatgggaataccagaacaactaaaattagctatggaacaagaacagatggggaaagatgaatcaaatgaaattgaaatgacaattccaggtttagattggggaatggaggaagtgatgcaaaaggatcagaaaaaagtacctcagaagaaagttccttatgcaaaacccattcctgctcagttccagcaggcttggatgcaaaataaagttccaattcctgctccaaatgaggtgctgaatgacagaaaagaagacattaaattggaagagaagaaaaaaacacaagcagaaattgagcaagaaatggctacattacaatatactaacccacaacttctggagcaacttaaaattgaaagacttgcacagaaacaagttgagcaaattcagcctcctccctcatctggcacccctctcctcggaccccagccttttccaggacaaggtccaatgtctcagattcctcaaggttttcaacagccccatccatctcagcagatgccaatgaacatggctcaaatggggcctccaggtccacagggacagtttaggcctcctggaccccagggacaaatgggaccacaaggtcctccactgcatcagggaggtggggggccacaaggattcatgggaccacaggggccccagggcccgccccaggggttgccacggcctcaggacatgcatgggccccaaggaatgcagaggcatcctggacctcatggccctttgggacctcaagggccacctggaccacaaggtagttctggtcctcaaggtcatatgggtcctcagggtccacctggcccacagagtcacataggcccccaaggcccgcctggccctcagggtcacttgggcccacaggggcctccgggtactcaaggtatgcagggaccacctggtcccagaggaatgcaagggcctcctcatcctcatgggatccaaggcggaccagggtctcaagggatccaaggtcctgtgtctcagggacctctgatgggattgaatccaagaggaatgcaggggcctccaggcccccgggagaaccagggtcctgctccccaagggatgattatgggccacccgcctcaagagatgagaggacctcaccctccaggtggactactgggacacggccctcaggaaatgagaggtcctcaggagatccgaggcatgcaggggcctccaccccaaggatcaatgctgggacctccccaggaattgcgagggcctccaggctcacaaagtcagcaggggccgccccagggctctttaggacctccaccccagggtggcatgcaaggaccccccggacctcagggacagcagaacccagcaagagggccacatccatctcaagggccaataccattccagcaacagaaaacgcctctgctaggtgatgggccccgggcccccttcaaccaggaaggacagagcacaggccccccacccctgataccaggcctagggcagcagggagcacaaggtcgcattccccctctgaaccccggacaaggacctggccccaacaaaggtgactcccgcggccctccaaaccatcacatgggcccgatgtcagagaggcggcatgagcagagcggcgggcctgagcatgggcccgagagggggcctttccggggtggccaggactgcaggggtccccctgataggcgtggccctcacccagacttccccgatgacttcagcagaccagatgacttccaccctgacaagcgctttggccaccggttacgtgaatttgaggggcgaggaggacctttaccgcaagaagagaagtggaggcgagggggccctgggcctccgtttccccctgatcacagggaattcagcgagggggatggccggggtgcagcccgaggccctccgggggcatgggaaggccgcaggcccggagatgaacgtttcccccgggatcccgaggacccacgttttcgagggcgcagagaagaaagtttcagaagaggagccccgccgaggcatgagggccgtgctccccccagaggaagggatggttttcctggtcctgaagactttggtccagaggagaattttgatgcttctgaggaagcggcccgaggacgagatctcagaggtcgaggtcggggtaccccacgaggaggaaggaagggtttacttcccactcctgacgagttccctcgctttgaaggagggcggaagccagattcctgggatggaaacagagagcctgggccaggtcatgaacattttcgtgatactccccgccctgatcatccccctcacgacggtcattccccagccagcagagaacgctcctcttctctccaaggcatggacatggcatccctacctccccgaaagcgcccctggcatgatggcccaggcacttctgagcacagagagatggaggccccaggaggcccttctgaagaccgaggaggcaaaggccgagggggcccaggacctgctcagagagtgcccaaatctgggcgttccagctccttagacggagagcaccacgatggataccacagagatgaaccttttgggggccctccaggcagtggcaccccttctcgagggggccggagtggcagtaactggggtagagggagtaacatgaactctggcccgccgaggcgaggagcttcacggggtggtggaaggggtcggtagaagctggaactgagtaccctgaggcctttttggacagtatgtaagaactttttgtggactcaccaagagaaacaaaaggaagcctgcaccattgtagccctgaacttttttttgggcacctgaatcccaggaaccctcaatgaggttttcaagatgaagagactgctgccagctaccagcctggctggccctgtcctgtccaccctcattgccccaactcccatgttgttttgtgaagataaaagctgggatctttttctttttttttaagtctcacaagacatggggcatttccacaaatttaagttcctgtccatttggaaatttgtttttatgtgtacagtttgtcagagaaaaacaaagtttttgtatgaatacagaatgtgatttacgcaagaaaaaaaaaaaaaaaaaaaaaaaaaaaaaaaaaaa

SEQ ID NO: 425 - DNA, 60 bp, Homo sapiens
gaaatggatgagaaacattgtatgtagggatgtttagcaatcagtcttttaatagacagc

SEQ ID NO: 426 - DNA, 1535 bp, Homo sapiens
ggggaatcacgactatgatttacttaaacacgtaacacattcaaggatatataaatggagtctaagtattttgcttttgaagagaataatctatgaaatggaagacttgatttttttttttcattttttagaagtaatacacatttatgattgttggcacataaaactatgcaaaataattctttttaagtatctgtaagaaggaattggcagtttaaacggattttgcttatttatgcactacagaatgcagcatactgtattactgttgaggctgcttaataagtttaccaatgtgaaaagcagatcttgggtataagtgtatgcctgatttgagcttttaaaactgtgcagtaggtgtatggtaatgtattacaatcctatgtagcaaaataggaaattatgaatttttgttgttattgttttaaagatttaagatggattggggtagggaacagctggagccaggtataccttctagtatgtagagggaaacaatgtttagataggaaaaaggaagccgtctgtttacagttaactttatttcatggacttctacaaaatgttgtattaatcactttttctagttcaaggaatttcaattccagggtacaaaccattgatttaaaaattacgtttccattctttttagtatcagtttaaagtaaatgcttaccatcagccagttgctgtcactgggaagaaggcaacttgaagtatttactgataaaatagcctttattcccaagtgtgacttttcttcagtgtctacatattatgtcacacgttctatttgcactgctgcaatatagatcaaagatcttgtggcataggggtaggggagtgttagtatctcccttgtcccatttgttctgttactgcttcattggactgatacaccctcatgaacttgcaatcacctaaatggaagtcttgaatgtgtcaccttttgcttggttatttcaaccatgctgctatatataatcaggtgtggcacagtttgtcagtttgattataggtgtgagtggatagaaatcattacactgtgctgttaacgatccttgtctgcttgctgttacctactttttacaggcatcataataaaagctagactatttctttggggggaaagagacttatttaatgtaatttaaaaaacttttccaatagaaaatgaaatattattgaaaataatatctattttttagctttcagcaattgatggtgctttgttgtggtgtctgctggaagtctactgccattatagggaaccttgcttgttagcttctctagatctctattctaaacaatctgttagtgatgataaattctgtaggagggtctattctgagccgttaacttcctgtaaggggaaaatgggtgggttaccagaaataccattgaagcagggtgggctgtggggtggaaggttggggtatttgtcttgagaattaaaaactacgaaacacttttgtacacaactgattttttaaaaaataaacacatttttaaagaaaaaaaaaaaaaaaaaaaac

SEQ ID NO: 427 - DNA, 60 bp, Homo sapiens
tagtgatgataaattctgtaggagggtctattctgagccgttaacttcctgtaaggggaa

SEQ ID NO: 428 - DNA, 928 bp, Homo sapiens
gcgcgcagcgctggtaccccgttggtccgcgcgttgctgcgttgtgaggggtgtcagctcagtgcatcccaggcagctcttagtgtggagcagtgaactgtgtgtggttccttctacttggggatcatgcagagagcttcacgtctgaagagagagctgcacatgttagccacagagccacccccaggcatcacatgttggcaagataaagaccaaatggatgacctgcgagctcaaatattaggtggagccaacacaccttatgagaaaggtgtttttaagctagaagttatcattcctgagaggtacccatttgaacctcctcagatccgatttctcactccaatttatcatccaaacattgattctgctggaaggatttgtctggatgttctcaaattgccaccaaaaggtgcttggagaccatccctcaacatcgcaactgtgttgacctctattcagctgctcatgtcagaacccaaccctgatgacccgctcatggctgacatatcctcagaatttaaatataataagccagccttcctcaagaatgccagacagtggacagagaagcatgcaagacagaaacaaaaggctgatgaggaagagatgcttgataatctaccagaggctggtgactccagagtacacaactcaacacagaaaaggaaggccagtcagctagtaggcatagaaaagaaatttcatcctgatgtttaggggacttgtcctggttcatcttagttaatgtgttctttgccaaggtgatctaagttgcctaccttgaatttttttttaaatatatttgatgacataatttttgtgtagtttatttatcttgtacatatgtattttgaaatcttttaaacctgaaaaataaatagtcatttaatgttgaaaaaaaaaaaaaaaaaaaaaaaaaaaaaaa

SEQ ID NO: 429 - DNA, 60 bp, Homo sapiens
cactccaatttatcatccaaacattgattctgctggaaggatttgtctggatgttctcaa

SEQ ID NO: 430 - DNA, 1414 bp, Homo sapiens
gggtttgaagaccttcagcgttgccctggcggacagagacaggccctcggggtggaggtctttggtttcataagagcctgagagagatttttctaagatatgtgtaacacaccaacgtactgtgacctaggaaaggctgctaaggatgtcttcaacaaaggatatggctttggcatggtcaagatagacctgaaaaccaagtcttgtagtggagtggaattttctacttctggtcatgcttacactgatacagggaaagcatcaggcaacctagaaaccaaatataaggtctgtaactatggacttaccttcacccagaaatggaacacagacaatactctagggacagaaatctcttgggagaataagttggctgaagggttgaaactgactcttgataccatatttgtaccgaacacaggaaagaagagtgggaaattgaaggcctcctataaacgggattgttttagtgttggcagtaatgttgatatagatttttctggaccaaccatctatggctgggctgtgttggccttcgaagggtggcttgctggctatcagatgagttttgacacagccaaatccaaactgtcacagaataatttcgccctgggttacaaggctgcggacttccagctgcacacacatgtgaacgatggcactgaatttggaggttctatctaccagaaggtgaatgagaagattgaaacatccataaaccttgcttggacagctgggagtaacaacacccgttttggcattgctgctaagtacatgctggattgtagaacttctctctctgctaaagtaaataatgccagcctgattggactgggttatactcagacccttcgaccaggagtcaaattgactttatcagctttaatcgatgggaagaacttcagtgcaggaggtcacaaggttggcttgggatttgaactggaagcttaatgtggtttgaggaaagcatcagatttgtccctggaagtgaagagaaatgaacccactatgttttggccttaaaattcttctgtgaaatttcaaaagtgtgaactttttattcttccaaagaattgtaatcctccccacactgaagtctaggggttgcgaatccctcctgagggagatgcttgaaggcatgcctggaagttgtcatgtttgtgccacgtttcagttcagttctgaagtgttattaaatgtgttcctcagcgacagtgtagcgtcatgttagaggagacgatctgacccaccagtttgtacatcacgtcctgcatgtcccacaccattttttcatgaccttgtaatatactggtctctgtgctatagtggaatctttggttttgcatcatagtaaaataaaataaacccatcacatttggaacataaaaaaaaaaaaaaaaaaaaaaaaaaaaaa

SEQ ID NO: 431 - DNA, 60 bp, Homo sapiens
cttcgaccaggagtcaaattgactttatcagctttaatcgatgggaagaacttcagtgca

SEQ ID NO: 432 - DNA, 1912 bp, Homo sapiens
attttagcgcatggtaatatttgatgcagttgtctctccttaagtattgtgattttcttcctttattaagagggttgtgggtcattccatgcttctcttaaggtatctttttactctgttttactgttatattttagaagatagttttaagaaacataaaaaccatgcttgttatcttaacgtagtagtagtgtacataatagtaaaaagggcaagccagccccctctgccctcgaaaaactgtattctccaactcccactacattttctcatattgaatctgttccacctgtgatttattgttttcctgagctttgggagttttaagcaatgatacagttgaagggactgtttataattttcacatgtttaagttgtgaggctttaaaacttaaatataaggctttgtctaggaagaaaatgatctttaccttcaataaatttataatgtagcactaatccagtatagattggagactgaatgcattcttactcttagggttcatacctctaattcatgtggttaagacagtgttgtggtgaagtaatagggccccttgaaagaatctacagaaacataaattatactgagttgtgctgtactggtttgtgagaacatcagtgtattaaggagaatggtagtttaatttgaatatttaaagaaagtaatttgaatggttctagtactagggccattattaactagtaacatagattagtgacttcaactgggtgtccttattatctgatttgtctgaagtgaaaactgttaaggtgctcttttaaaatgtatttggaaacaccatagttagggtaaatacaatgtcacaattcactcttgcatattatttgcttagccaaatttatgaattctaagttaggccaaattgaaggttttggagttttacattgtgggtgagtctaaattcatgcgtttggcaagcacaaggacatgggaaaagaatctggtattttgaggcaggcttgagtttataatgaaagcaaactcagttcctcttcatgtcctatgtatttaagagaggacagttttccctcagttttttttccccttccttacccctacccccatcaaatacagcccaaccaaataactgtgttcttaatttaaaggaaaatggcagacttgatacctgctgaatatttcgtgtagacagagtatgacaatgaatgagatccccagtcattgcccttgtaagcctgggaacccagtttagtgggagagactaatgtaaacagctttaatcaaaagtatatcaattggccgggtgctgtggctcacacctataatgccggcactttgggaggccaaggtgggtggatcacttgaggtcaggagtttgagaccaccctggccaacatggtgaaaccctctccctatttaaagaaaaaaaagtaaggcatatcaatttatggttatcaaataggtttttttttttttttgagactgagtgtcgctctatagcccaggctggagtgtagtgctcactgcgacttccgcctcctgggtcaagtgattctcgtgcctcagtctcccgagtagctgggattgtaggcgcctgccaccacgcccagctaatttttgtatttgtagtagcgatggggtttcatcatgttggcgaggctggtcttgaacacctgacctcaagtgatctgccttagcctcactgcttgcctctaagtggtgggattgcaggtgtgagccactgtgctggcctcaaatagtttttatcaaagctacttcaattagtggttagcaaggcttaaagactaattcagtgctttattttgacacttgttcgcaacatgttgctttttttcctgtgtcctatgggacctagtcatctgtatgttagattcacagaggaattaaagagataaacatgcatgtgct

SEQ ID NO: 433 - DNA, 60 bp, Homo sapiens
cctgaactttgggagttttaagcaatgatacagttgaagggactgtttataattttcaca

SEQ ID NO: 434 - DNA, 1362 bp, Homo sapiens
catttggggacgctctcagctctcggcgcacggcccagcttccttcaaaatgtctactgttcacgaaatcctgtgcaagctcagcttggagggtgatcactctacacccccaagtgcatatgggtctgtcaaagcctatactaactttgatgctgagcgggatgctttgaacattgaaacagccatcaagaccaaaggtgtggatgaggtcaccattgtcaacattttgaccaaccgcagcaatgcacagagacaggatattgccttcgcctaccagagaaggaccaaaaaggaacttgcatcagcactgaagtcagccttatctggccacctggagacggtgattttgggcctattgaagacacctgctcagtatgacgcttctgagctaaaagcttccatgaaggggctgggaaccgacgaggactctctcattgagatcatctgctccagaaccaaccaggagctgcaggaaattaacagagtctacaaggaaatgtacaagactgatctggagaaggacattatttcggacacatctggtgacttccgcaagctgatggttgccctggcaaagggtagaagagcagaggatggctctgtcattgattatgaactgattgaccaagatgctcgggatctctatgacgctggagtgaagaggaaaggaactgatgttcccaagtggatcagcatcatgaccgagcggagcgtgccccacctccagaaagtatttgataggtacaagagttacagcccttatgacatgttggaaagcatcaggaaagaggttaaaggagacctggaaaatgctttcctgaacctggttcagtgcattcagaacaagcccctgtattttgctgatcggctgtatgactccatgaagggcaaggggacgcgagataaggtcctgatcagaatcatggtctcccgcagtgaagtggacatgttgaaaattaggtctgaattcaagagaaagtacggcaagtccctgtactattatatccagcaagacactaagggcgactaccagaaagcgctgctgtacctgtgtggtggagatgactgaagcccgacacggcctgagcgtccagaaatggtgctcaccatgcttccagctaacaggtctagaaaaccagcttgcgaataacagtccccgtggccatccctgtgagggtgacgttagcattacccccaacctcattttagttgcctaagcattgcctggccttcctgtctagtctctcctgtaagccaaagaaatgaacattccaaggagttggaagtgaagtctatgatgtgaaacactttgcctcctgtgtactgtgtcataaacagatgaataaactgaatttgtacttt

SEQ ID NO: 435 - DNA, 60 bp, Homo sapiens
tcccgcagtgaagtggacatgttgaaaattaggtctgaattcaagagaaagtacggcaag

SEQ ID NO: 436 - DNA, 6296 bp, Homo sapiens
cactgggagagtttatgtggccgaggcagacaagtggaattaggccttgctgcaggggacttcatttccttctcagtactggacccatttatgaggaggtggcttatgaaagtgtgatgttcgcgtatttcttgacaggcagtggcgtgatcttggctcactgcaacctccgactccctggttcaagcgattctcctgcctcagcctcctgagtggggattacaggccacagcaaacacaggtgtgcaggaaccgtttgtcatggaagccagggagcctgggaggcccacacccacctaccatcttgtccctaacaccagccagtcccaggtggaagaagatgtcagctcgccacctcaaaggtcctccgaaactatgcagctgaagaaggagatctccctgctgaatggggtcagcctggtggtgggcaacatgatcggctcagggatctttgtctcacccaagggtgtgctggtacacactgcctcctatgggatgtcactgattgtgtgggccattggtgggctcttctctgttgtgggtgccctttgttatgcagagctggggaccaccatcaccaagtcgggagccagctacgcttatattctagaggcctttgggggcttcattgccttcatccgcctgtgggtctcactgctagttgttgagcccaccggtcaggccatcatcgccatcacctttgccaactacatcatccagccgtccttccccagctgtgatcccccatacctggcctgccgtctcctggctgctgcttgcatatgtctgctgacatttgtgaactgtgcctatgtcaagtggggcacacgtgtgcaggacacgttcacttacgccaaggtcgtagcgctcattgccatcattgtcatgggccttgttaaactgtgccagggacactctgagcactttcaggacgcctttgagggttcctcctgggacatgggaaacctctctcttgccctctactctgccctcttctcttactcaggttgggacacccttaattttgtaacagaagaaatcaaaaacccagaaagaaatttgcccttggccattgggatttctatgccaattgtgacgctcatctacatcctgaccaatgtggcctattacacagtgctgaacatttcagatgtccttagcagtgatgctgtggctgtgacatttgctgaccagacgtttggcatgttcagctggaccatccccattgctgttgccctgtcctgctttgggggcctcaatgcatccatctttgcttcatcaaggttgttcttcgtgggctcccgggagggccacctaccggaccttctgtccatgatccacattgagcgttttacacctatccctgctttactgttcaattgcaccatggcactcatctacctcatcgtggaggatgttttccagcttatcaactacttcagcttcagctactggttcttcgtgggcctgtctgttgttggacagctctacctccgctggaaggagcccaagcggccccggcctctcaagctgagcgtgtttttccccatcgtgttctgcatatgctccgtgtttctggtgatagtgcccctcttcactgacaccattaattccctcattggcatcgggattgccctttctggagtccctttctacttcatgggtgtttacctgccagagtcccggaggccattgtttattcggaatgtcctggctgctatcaccagaggcacccagcagctttgcttttgtgtcctgactgagcttgatgtagccgaagaaaaaaaggatgagaggaaaactgactagaggtcagaggtggctttctgaggcctggaaggcaggccaaccagcaaaatcctgataacaagactctgtgggcccaactctcctgaattaaaggagccttttgacccaatcatatagtggggctcagggccagtgctcactcttattggtaagctataggagactcaggatctgggccaacctcaaggtgggggcttcagagggtggggggaagattggggaacggggggaatggtcatttagttttactcctgataggtagatgcagctcttacagatatttacttggtaaagtgcagtggggaagagggaatgctaggttgatagggctggtggcttctgaatttggtatttgaactaggagtccctatagaggggctgctttatgggaagtttttctctgaccaggtacaacacctgactttaaaggcctgaaatgctaccatttcttcctctggctcaaaattcttccctggggagagagttatattcccttatttattgatatttagtccagaacaccagttctaacgaagcatgcgtgtctcttcatctacaggatgcaataggctgattgtatttaaaaatcaaagtacccaaaactgagtccctttgggctcagaaatgtctgtggtattgggtcagactctgaccacagattttatgctgtttagcacaatttctattgagtcttacctgcaacaatgaaccttaaagatttttttactcacgtacctgttacactttagcatacagatagatcatagatcacgttacaagcacttggctcaggtccagcaaggacagatgaacaaattcctgagtcagaagtctgttaatattgctgttttgaaggacaatcctttattttacttgagaccttacatctttgttctagctgacagtaaatctctgggtttctgttacgaactctaagagggctgaaacttctgatattcaggtggatcacctgaattctctcagctgtcaatggcttggagaacatctcatgggcccaagtcatcaaataacctgttcctctctgtaagggcagtgtgagggactgctgtgcagacccaagcaatcccaacctggtgctaggtcatttcacttttctgaaaacctcacatcaggctgcatcctcttctgtccctggcaccaggctttgtttacacttggagccaccttggtgtgggtcaccgggacagtgtactcctctcctgccagcctccccttccccgaggtgtggtggctgcagtctcaggaagagcttggtacttgtggggacttctgttttctccctgtggagatcagtgaagactgggaggaaagctgcttcaacctgagtccggctcttcagcaggctgcacaagtggaagcaactaattctggtgctcaggctgggctctccacccaagttaggcctgctctggcctaatggatcttactgtatgagcaggacggctgcattggattgtacaactgttttgtgatgcccccagacactgtcatcctaggccgagaagaacctgctagcttgacataccccatgggcttatccttaggttttggaattggtcaacagtgaggcagtctcccttcctgaccattcttctccacccagtcacagataagggaataaccttggccatatatttgctcaataaagattgaaggaagcatggtcatagttgccctgggttcagagcataatgcatatgtgaagcatggggtgacattcctactgtcatgggtttgggatttgtaacggcaaattcctgcccgacgacagggtgtcttatgcaaaggctgacttgcctgaacgctaagaacatgacttctgtctgagctaagctggcacccatcccagggctcctctggagctaatcctttaagcaaaatgtgcttgccttttaaagatccctgaccccagctttagctttctccaccagataaccagctaatcccaggaatttgctgccccccaccagtggcttctagggaaagcaaggacctcacatgccaggtgccctagtacttgcttagtgagccatgtcatcctcctttcatttttggatggtgacagcatttttcccctctgtgctggatacagacttctcccaggatcctctctttgggagcgaagccagaggatccctacagcactcaagcttcatggtggaattaatttctgccagctctttgttgtctgtctccttaaatccttttcctggtgtgcttattatcccttttgcagtgagtacagtttattaagttgtcagccctttaatattggggaaacttaatgagtataaatagcagggagcacattgtaacagcacagtgttttgtttttttcacccggttgctgtatgagaatggctttcaatcctttgtttctatgcctacagacagaaagcaagatgtctaatattagacatacaagttgctgcctgttataacggtgaattatacctttgtgcatgcctaggatgtttgttgttttaattagctgcaatatatacggcctgtgtacacagaatttaatcacttcggcaggttgaacaactccatgtagataagagcaagtgtaggcaaaggtttagaaaatggacataaagtcaaagaatgatggcaggtaggatgaaggagagatacttaggaaatcctaaaagaggcggcaagaaggtacctccctgtgtaactcaccttcccccatgacagtaagagacactcacaggctatgagggtacacccctagctgaatgttctgtgttgtttccttagacctgtggtgtccgctgcaacagctactagccacgtgtagctaattacattaaaatgaaataaaattaaaagctcagtttctcagttgcgctaatcacatttcaagtgctcagcagccacccgtgtctactactacacagtgcagacacagaacatatcatcactgcagatagttctactggacaatgttacgctagaataaacaccaaggcagtcagttaaggcagctatggtttggaaaggcatacggacagagtctgcttagaagagatacaagttgttaataaaattgatcctgttgatagtagtttgtttttgtggtgggtgctgtgaagagtaaacattactcagtggaaagctaagttcagaaggtactttgtttttcctcccttgccttaagtccttggtatttataatcaatgctgaaccttctatttcactaccgctccctgttttagatattcagatttaaaaggttttcaaagaattactttcttccatgttcaaagctagattttactaaacacatgtatcacattcatatatattgtttcttggccccactgccaaaggaagtcagtcagtaatttcacaaccgttatcagagtttggaagcagaaatagctgttaactaaaatctcccactgctcagactactttctgccctaatggccattactatccagtctgtattgctacaagggacccactggtaccccttttagattctatcaaaaggaacagggttttcctagaggcaggcagcctggtggtatggcacagcagaagcttactgctaatgaaatgggaacctccccctcccttgtggtttcagcacagaacctgaatgccaggaaaaattcctgggccaagaagctaaagctaaagaaaccttccttttttcaacgtttttttttctttcaaactgtagggtcacttttgattgaggcaaaggggtcctactgtaagtggaaaagactcactcccctaacataagttttcactgtggtgggatggtgccgcccgatatgcttgatatgcttttccttccacatgttaagctaggaaacctaacaggatgtcagcagggcagttaactctggactcagagccctcaagggcatgtggcagaacctcatggacatcacaagaccatcagtctgaatccaggtcgtgggggctgtcatagccgaactccttctgcacatccagagggtacttgctccacatccgctgtctgctgctgcctctttcctcctcactcaggctgttgtagtcagcagagcctagaatgacatcccgggagtggattctaaatgtgattttcctaggctactgcaggagccccttctcttctcagaaaggtctgtttttgttcccgattgtaatgcaaaatccttgctcaataaataaaaaagaatatagaattcttttttttttaaagaaggaatcactttcctatcatctaaaccaagttccttcacactggagtattttgtcacttctcccctccgtggagtattttgtcacttctcccctccgtataggattttttgttgttgtaagagttgtagtcatattgtaaatatttttgtacctttctccttttaacgtgttattgacaaacctccccaaaagaatatgcaattgtttgattcatttctctgttatcagacaccaataaattctttttgttgggc

SEQ ID NO: 437 - DNA, 60 bp, Homo sapiens
ttaaagaaggaatcactttcctatcatctaaaccaagttccttcacactggagtattttg

SEQ ID NO: 438 - DNA, 1932 bp, Homo sapiens
ggcacgaggcctcgtgccgccgggctcttggtacctcagcgcgagcgccaggcgtccggccgccgtggctatgttcgtgtccgatttccgcaaagagttctacgaggtggtccagagccagagggtccttctcttcgtggcctcggacgtggatgctctgtgtgcgtgcaagatccttcaggccttgttccagtgtgaccacgtgcaatatacgctggttccagtttctgggtggcaagaacttgaaactgcatttcttgagcataaagaacagtttcattattttattctcataaactgtggagctaatgtagacctattggatattcttcaacctgatgaagacactatattctttgtgtgtgacacccataggccagtcaatgtcgtcaatgtatacaacgatacccagatcaaattactcattaaacaagatgatgaccttgaagttcccgcctatgaagacatcttcagggatgaagaggaggatgaagagcattcaggaaatgacagtgatgggtcagagccttctgagaagcgcacacggttagaagaggagatagtggagcaaaccatgcggaggaggcagcggcgagagtgggaggcccggagaagagacatcctctttgactacgagcagtatgaatatcatgggacatcgtcagccatggtgatgtttgagctggcttggatgctgtccaaggacctgaatgacatgctgtggtgggccatcgttggactaacagaccagtgggtgcaagacaagatcactcaaatgaaatacgtgactgatgttggtgtcctgcagcgccacgtttcccgccacaaccaccggaacgaggatgaggagaacacactctccgtggactgcacacggatctcctttgagtatgacctccgcctggtgctctaccagcactggtccctccatgacagcctgtgcaacaccagctataccgcagccaggttcaagctgtggtctgtgcatggacagaagcggctccaggagttccttgcagacatgggtcttcccctgaagcaggtgaagcagaagttccaggccatggacatctccttgaaggagaatttgcgggaaatgattgaagagtctgcaaataaatttgggatgaaggacatgcgcgtgcagactttcagcattcattttgggttcaagcacaagtttctggccagcgacgtggtctttgccaccatgtctttgatggagagccccgagaaggatggctcagggacagatcacttcatccaggctctggacagcctctccaggagtaacctggacaagctgtaccatggcctggaactcgccaagaagcagctgcgagccacccagcagaccattgccagctgcctttgcaccaacctcgtcatctcccaggggcctttcctgtactgctctctcatggagggcactccagatgtcatgctgttctctaggccggcatccctaagcctgctcagcaaacacctgctcaagtcctttgtgtgttcgacaaagaaccggcgctgcaaactgctgcccctggtgatggctgcccccctgagcatggagcatggcacagtgaccgtggtgggcatccccccagagaccgacagctcggacaggaagaacttttttgggagggcgtttgagaaggcagcggaaagcaccagctcccggatgctgcacaaccattttgacctctcagtaattgagctgaaagctgaggatcggagcaagtttctggacgcacttatttccctcctgtcctaggaatttgattcttccagaatgaccttcttatttatgtaactggctttcatttagattgtaagttatggacatgatttgagatgtagaagccattttttattaaataaaatgcttattttaggctccgtccccaaaaaaaaaaaaaaaaaaaaaaaaaaaaa

SEQ ID NO: 439 - DNA, 60 bp, Homo sapiens
caagtttctggacgcacttatttccctcctgtcctaggaatttgattcttccagaatgac

SEQ ID NO: 440 - DNA, 1482 bp, Homo sapiens
gcacgagccgccaccatggcttcacgtggggttgttggcattttcttcctctctgctgtcccccttgtgtgtctggagctccggcgtgggatcccggatataggaatcaaggattttcttttgctttgtggccggattttgctactgcttgctcttcttactttaattatttctgtgactacctcatggcttaactcatttaaatctccccaagtttatctgaaggaagaagaagaaaagaatgagaaaagacaaaaacttgtgagaaaaaaacaacaagaagcacaaggagagaaggccagcagatacatagagaatgttttaaaacctcaccaggaaatgaaattgagaaaactggaggagcgcttttatcaaatgacgggtgaagcctggaaattaagcagtggtcacaaacttgggggtgatgaaggtacaagtcagacatcttttgaaacatcaaacagagaagcagcaaagagccagaacttgcctaaacctttaactgaatttccgtctcctgctgaacagcccacatgcaaggagattcctgatttacctgaagaaccttctcaaacagcagaagaagtagttactgttgctctccgatgtcccagtgggaatgtcctgaggagaaggtttttgaagtcctacagctcacaggtcttatttgactggatgacgagaattgggtaccacatatctctatacagcctttctacttcctttcccagacggcctctggcagtggagggaggccagtcgctggaggacataggaataactgtggacactgtactcatcctggaggagaaggagcagaccaactaggaaagaagggagagctccctgtttgcatgaagtcagttatgctatgaccttctggcacaataaaggcttcactttcgaatcacaccataccttgattgagctcatggcagtaaactttgaacattgatatccatgggaataggattagaaaaggattgctttctatatataataatctgtggactgtgccattttacagtgtacccaaatgagaatgaggttgaaatgtatgcagtaaggtactcagtaattaattggtattttttcccagctgacatgatttcctcagtgttagaaaacaaacccttagaactttcctttctgcctcttcaatccatcttaccacacaatatttcatgattcaaattcttcaaagtcttatacgcaggaatgtttattctgctgtatttctgtgaaattaaaaacttggaagaagcttcaaagctcttggaggctttaaagttctttctgttgggtgtgcattacagtttacttaactgatgtttgcgatttatataattttgccttgtattaaatgttacaaagttccaaatgaatcagtattttaaaaaataaaactatgaaagcattaaaatataggtgaatttttaaaaaaaaaaaaaaaaaaaaaaaaaaaaaaccaaaggggggggg

SEQ ID NO: 441 - DNA, 60 bp, Homo sapiens
gaatgaggttgaaatgtatgcagtaaggtactcagtaattaattggtattttttcccagc

SEQ ID NO: 442 - DNA, 2164 bp, Homo sapiens
cttccagctggtgggagttgacgacgtggtgctgggcgttgggaccctactttatctagttcgggaagttgggttgtggggtcatacctgtctgtctgctcccagctttcttgggtttcttccgacggcgtggggcctcgctaaggaattcccggcccctcagggccacggctttagcggtgtcttttgcgagttcttcgtaagtacatcttaaagctgtcaagatggttctagcagaccttggaagaaaaataacatcagcattacgctcattgagcaatgccaccattatcaatgaagaggtattgaatgctatgctaaaagaagtctgtaccgctttgttggaagcagatgttaatattaaactagtgaagcaactaagagaaaatgttaagtctgctattgatcttgaagagatggcatctggtcttaacaaaagaaaaatgattcagcatgctgtatttaaagaacttgtgaagcttgtagaccctggagttaaggcatggacacccactaaaggaaaacaaaatgtgattatgtttgttggattgcaagggagtggtaaaacaacaacatgttcaaagctagcatattattaccagaggaaaggttggaagacctgtttaatatgtgcagacacattcagagcaggggcttttgaccaactaaaacagaatgctaccaaagcaagaattccattttatggaagctatacagaaatggatcctgtcatcattgcttctgaaggagtagagaaatttaaaaatgaaaattttgaaattattattgttgatacaagtggccgccacaaacaagaagactctttgtttgaagaaatgcttcaagttgctaatgctatacaacctgataacattgtttatgtgatggatgcctccattgggcaggcttgtgaagcccaggctaaggcttttaaagataaagtagatgtagcctcagtaatagtgacaaaacttgatggccatgcaaaaggaggtggtgcactcagtgcagtcgctgccacaaaaagtccgattattttcattggtacaggggaacatatagatgactttgaacctttcaaaacacagccttttattagcaaacttcttggtatgggcgacattgaaggactgatagataaagtcaacgagttgaagttggatgacaatgaagcacttatagagaagttgaaacatggtcagtttacgttgcgagacatgtatgagcaatttcaaaatatcatgaaaatgggccccttcagtcagatcttggggatgatccctggttttgggacagattttatgagcaaaggaaatgaacaggagtcaatggcaaggctaaagaaattaatgacaataatggatagtatgaatgatcaagaactagacagtacggatggtgccaaagtttttagtaaacaaccaggaagaatccaaagagtagcaagaggatcgggtgtatcaacaagagatgttcaagaacttttgacacaatataccaagtttgcacagatggtaaaaaagatgggaggtatcaaaggacttttcaaaggtggcgacatgtctaagaatgtgagccagtcacagatggcaaaattgaaccaacaaatggccaaaatgatggatcctagggttcttcatcacatgggtggtatggcaggacttcagtcaatgatgaggcagtttcaacagggtgctgctggcaacatgaaaggcatgatgggattcaataatatgtaaagaaaatgccttaatataaactgactcagttgaatacctaatttgctgagacctcagcgtttcccttctttttgcgaattggggggaaagtgtatttttcttgcttatcatgcactctttccttttcttctcgcccgcttttcccctccttttctttttccttccttctttcctccctttaatataagggagaaatacatggtttttgtggaaatcattatatgtttgctttagattttcttctgttttcaccatcataacacttaagttaaatcatgatgtaaaattttagtacttaaaggtttttaattatctcgaaggccaagcattgcatttgtaaacagtcctggtcagtagttaaataatgtttcaattaaagtgctgtaaaataaacttcaaagtggttataaaaaaaaaaaaaaaaa

SEQ ID NO: 443 - DNA, 60 bp, Homo sapiens
gcaaaattgaaccaacaaatggccaaaatgatggatcctagggttcttcatcacatgggt

SEQ ID NO: 444 - DNA, 1568 bp, Homo sapiens
cgtccttcctcagccgcgggtgatcgtagctcggaaatggcgggatttggtgctatggagaaatttttggtagaatataagagtgcagtggagaagaaactggcagagtacaaatgtaacaccaacacagcaattgaactaaaattagttcgttttcctgaagatcttgaaaatgacattagaactttctttcctgagtatacccatcaactctttggggatgatgaaactgcttttggttacaagggtctaaagatcctgttatactatattgctggtagcctgtcaacaatgttccgtgttgaatatgcatctaaagttgatgagaactttgactgtgtagaggcagatgatgttgagggcaaaattagacaaatcattccacctggattttgcacaaacacgaatgatttcctttctttactggaaaaggaagttgatttcaagccattcggaaccttacttcatacctactcagttctcagtccaacaggaggagaaaactttacctttcagatatataaggctgacatgacatgtagaggctttcgagaatatcatgaaaggcttcagacctttttgatgtggtttattgaaactgctagctttattgacgtggatgatgaaagatggcactactttctagtatttgagaagtataataaggatggagctacgctctttgcgaccgtaggctacatgacagtctataattactatgtgtacccagacaaaacccggccacgtgtaagtcagatgctgattttgactccatttcaaggtcaaggccatggtgctcaacttcttgaaacagttcatagatactacactgaatttcctacagttcttgatattacagcggaagatccatccaaaagctatgtgaaattacgagactttgtgcttgtgaagctttgtcaagatttgccctgtttttcccgggaaaaattaatgcaaggattcaatgaagatatggcgatagaggcacaacagaagttcaaaataaataagcaacacgctagaagggtttatgaaattcttcgactactggtaactgacatgagtgatgccgaacaatacagaagctacagactggatattaaaagaagactaattagcccatataagaaaaagcagagagatcttgctaagatgagaaaatgtctcagaccagaagaactgacaaaccagatgaaccaaatagaaataagcatgcaacatgaacagctggaagagagttttcaggaactagtggaagattaccggcgtgttattgaacgacttgctcaagagtaaagattatactgctctgtacaggaagcttgcaaattttctgtacaatgtgctgtgaaaaatctgatgactttaattttaaaatcttgtgacattttgcttatactaaaagttatctatctttagttgaatattttcttttggagagattgtatattttaaaatactgtttagagtttatgagcatatattgcatttaaagaaagataaagcttctgaaatactactgcaattgcttcccttcttaaacagtataataaatgcttagttgtgat

SEQ ID NO: 445 - DNA, 60 bp, Homo sapiens
agactaattagcccatataagaaaaagcagagagatcttgctaagatgagaaaatgtctc

SEQ ID NO: 446 - DNA, 1817 bp, Homo sapiens
aaatatacccatcttattttaagttgggtttatggcatcgctcatatatgtaaaagcactacaaactctttaaagaaaattgggaaactacagagaagtcaaagaaaaaaaaaagtaacccatatttctattgcccaggtataatccttgttaatattttggtttggtctcctcttttttcccccaatatagttgtaaataaatgatgtctttcagagttgacatttatcctgtagcttgaatggcatgtaaatgccagttgtatattttttcatgaagtgtaggtttggaatacactagagttagctatatgcttgaatgctgatcactggattctgagactgactactgagtctacctttttaatcaagcctaacatgaatgggctccaaaaagtaatgaatgtaattgtactttttgatgtgcctctgcacttggcttggtgagtcatcataaatagctgttaaatatgtgactttacagattttgatatgttcagattgtaaaaaatgaatagtttatttcattaattgatgggcagtcaagaatctccctcccttcagtagggctgacacttaggagttaggtcatggttgtggttacttggcatggctaatcagattttgttctggtcagaatttgcccaagatcaatacccagcagaaactggagttaggctataaaaaaccattcatgtttccgagtgatcatttcagtcagcgattcatgttttacagtgtttagttgttgattattagaaaaagtaatattttcttccctttatgattacatcattataaatcaagtccttccatgaacacatttaaggtgtgtggagatgagatctctgaatccatttggggatgggctgcatttttggggaactctatgcctgtccagtgaagagtgcctaaaacattaattatagatcaaagatgttctgttgagggacaaagcttgatggtcatcaaacacaaggctttgtaaaaatacgaccacctattccacttactggatctgtcaggtgtgtaaaacttctctcgccagttcatcatgcttccatgagccctcaggactgggatttgagccttcctggctctttatcccttggggcagacatggaaccatctctgagggaccaggtggatgctgaagctcacccagtcagggcccctctcctagctccttttacactgaaattaatctgaaagctttcatagccaaggctttgcctaggtgctattattccagctggccaaagagaagtcttgggccagattgggattctcaatggattttatagacataattcccctgcaaacttaaaaaaataaataacccctactttataggactaattgtttgaattgtatctttctctgtatgttaaaccagatttaaaactattttataaccacaatatgtaatcagagcaatatagtgttttcagatatataccttgttttataccttatgtaggtgtcctacataagggtggcatgcccactggctgtggtaaaatttaatcctcattgctttgggagtgacttaaggccttttgaagtggagcttttgcactttatactttttctgtgaactatgataactatatttgatattaaagctgtaagtggcattttcagcaaatgaatatgtacatgtttgtgtctatttccaaaatgatttctgaactatctgcagtgaaaatgtatctgatggattgtagagcaaagcacattgcctaaattcatttgttaatgaattgggtaccattgttattaaaaatgcgtaaagtaaaaaaaaaaaaaaaaaaaaaa

SEQ ID NO: 447 - DNA, 60 bp, Homo sapiens
tccaaaatgatttctgaactatctgcagtgaaaatgtatctgatggattgtagagcaaag

SEQ ID NO: 448 - DNA, 1224 bp, Homo sapiens
gttcggagcgggcgagcggagttagcagggctttactgcagagcgcgccgggcactccagcgaccgtggggatcagcgtaggtgagctgtggccttttgcgaggtgctgcagccatagctacgtgcgttcgctacgaggattgagcgtctccacccagtaagtgggcaagaggcggcaggaagtgggtacgcaggggcgcaaggcgcacagcctctagacgactcgctttccctccggccaacctctgaagccgcgtcctactttgacagctgcagggccgcggcctggtcttctgtgcttcaccatctacataatgaatcccagtatgaagcagaaacaagaagaaatcaaagagaatataaagaatagttctgtcccaagaagaactctgaagatgattcagccttctgcatctggatctcttgttggaagagaaaatgagctgtccgcaggcttgtccaaaaggaaacatcggaatgaccacttaacatctacaacttccagccctggggttattgtcccagaatctagtgaaaataaaaatcttggaggagtcacccaggagtcatttgatcttatgattaaagaaaatccatcctctcagtattggaaggaagtggcagaaaaacggagaaaggcgctgtatgaagcacttaaggaaaatgagaaacttcataaagaaattgaacaaaaggacaatgaaattgcccgcctgaaaaaggagaataaagaactggcagaagtagcagaacatgtacagtatatggcagagctaatagagagactgaatggtgaacctctggataattttgaatcactggataatcaggaatttgattctgaagaagaaactgttgaggattctctagtggaagactcagaaattggcacgtgtgctgaaggaactgtatcttcctctacggatgcaaagccatgtatatgaaatgcattaatatttgactgttgagaattttactgccgaagtttacctccactagttctttgtagcagagtacataactacataatgccaactctggaatcaaatttccttgtttgaatcctgggaccctattgcattaaagtacaaatactatgtatttttaatctatgatggtttatgtgaataggattttctcagttgtcagccatgacttatgtttattactaaataaacttcaaactcctgtggaaaaaaaaaaaaaaaaaaaaaaaaaaaaaaa

SEQ ID NO: 449 - DNA, 60 bp, Homo sapiens
gccgaagtttacctccactagttctttgtagcagagtacataactacataatgccaactc

SEQ ID NO: 450 - DNA, 713 bp, Homo sapiens
tcccagctgcgcgtcgcagtcccgacgcgagaagggctggagtcggcgtccagcctagagcccccggtgggagccaggccgggacgcgtgcaccatgccctacctgctcatcagcacccagatccgcatggaggtgggccccactatggtgggcgatgaacagtcggatccagagctgatgcagcatctgggggcttcaaagagaagagccttgggaaacaacttttatgaatactacgtcgatgaccctccccgcatagtcctggacaagctggaacgcaggggcttccgtgtgctgagcatgacgggggtgggccagacgctggtgtggtgtctgcacaaggagtgaccttctcatgctgatttgcagacggggcacccctgtggaggggctgctgtgggccctgacctccaagctcctgcctcaccgtctgccttgctcctctcttcccaaatcatcaccgccatgggcccagccccaaagggcagtgaatggccttctctgaaaccctgcgtcaagcagtgggagagggcagtgcccggtgccctggtgctcccagctgccctcctgcttcgggcctgggccgagggccttgtgtaggccatgttcctcgggcagctgccccgggccggagctgggcactccagcggccctggcgcgtggctcctgcatagctagcccaagccaataaagggctgtgatgagtggctgc

SEQ ID NO: 451 - DNA, 60 bp, Homo sapiens
cttcaaagagaagagccttgggaaacaacttttatgaatactacgtcgatgaccctcccc

SEQ ID NO: 452 - DNA, 2107 bp, Homo sapiens
gcacgaggttcgagagcgcgcagagtccagactggcggcagggcccgaggggccgacccgcagcgtccctggtctctccagccctcactcggaaccgcactgacaataccctcccctcccttgggctggacccctctctacagctaggagccaatggcagaagacaaaaccaaaccgagtgagttggaccaagggaagtatgatgctgatgacaacgtgaagatcatctgcctgggagacagcgcagtgggcaaatccaaactcatggagagatttctcatggatggctttcagccacagcagctgtccacgtacgccctgaccctgtacaagcacacagccacggtagatggcaagaccatccttgtggacttttgggacacggcaggccaggagcggttccagagcatgcatgcctcctactaccacaaggcccatgcctgcatcatggtgtttgatatacagaggaaagtcacctataggaacctgagcacctggtatacagagcttcgggagttcaggccagagatcccatgcatcgtggtggccaataaaattgatgacataaacgtgacccaaaaaagcttcaattttgccaagaagttctccctgcccctgtatttcgtctcggctgctgatggtaccaatgttgtgaagctcttcaatgatgcaattcgattagctgtgtcttacaaacagaactcccaggacttcatggatgagatttttcaggagctcgagaacttcagcttggagcaggaagaggaggacgtgccagaccaggaacagagcagcagcatcgagaccccatcagaggaggtggcctctccccacagctgaggggctggggctaggggtgggtggagcccttttaaaatacccttcccttcaacaactctccagctctgaatggagaaactctctaggccatcccctcttctacctcctgcaacccacccatcctattagcctcccacattcaaggcccgtgatacagggatgaggtcagcaccagcaaactctggactggtggaagaattccccaccagatctccttgaagcagaattagggatcagcatcattaacaccttccccaccccctccccccaggcagacagtgaagagaatcagaaaacatgattatgtgtcactttaatacaggaaatttaggtgttttttggtgtttttgtttttgtttttgttttctttccaaagctcacctcggggacaattccttgggcttctcctgaggtaatgattacccccccacccacagctgagtctgtgaggccccatcctttccctacgttttctcccatcttttttcctcttcagtctcccagtcatctggtttgtttgtttctttgttcgtcctgagacggagtctcgctctgtcgccaggctggagtgcagtggcgcagtctcggctcgctgcaacctctgactccctggttcaaacgattctcctgcctcagcctcccgagtggctggcatcaccacgcccagctaatttttgtatttttagtagagacggggtttcaccatgttgcccaggatggtctcgatctcctcacctcgtgatccgcccgcctcggcctcccaaagtgctgggattacaggcatgagccaccgcgcccggccccaatcatctgtttttaaacaatcgtttttgagcagatagctattcattccagattttcgtgtacccactctgtttcaggagctcttctaggtaaagctgagatcacaggaacagcaggtgacaggcctagctatagttaggaatacacaagcggtaaaatcgagtccttacagccataccacaaggtacgtccatttggactacaagaagagcttcctttaaagttcctatttcagcataaagaggctgtccttttttttttaggaatagtttggaccttgtgcctcctgtgggaggctgaggactgcaagaggagagctagcagatatgcctgttcacccctctctggtacttgtggcttgctagtatgtttttatgataatctcgggcattgtttgcattgtgtttattaatagggttttgtttttattgtttccttttttacagtaaaggctgaatgacat

SEQ ID NO: 453 - DNA, 60 bp, Homo sapiens
gctatagttaggaatacacaagcggtaaaatcgagtccttacagccataccacaaggtac

SEQ ID NO: 454 - DNA, 2031 bp, Homo sapiens
ggcacgagggcgagctgaggtggaggcaggctgcggcagacggcgacagtggcggcggcgccatggcagggcttgcaggatccctgctgccttggtgatcccgggctgacagccagagagcacagcggctcagctcctggagagtgagggttgaagaaagcggagggcagccgcctgcgcccgctggctcccattaggtcggttcctgcagcggtgcccggcagccttggtgaaggccctgcccggcagagatcatgtattgcctccagtggctgctgcccgtcctcctcatccccaagcccctcaaccccgccctgtggttcagccactccatgttcatgggcttctacctgctcagcttcctcctggaacggaagccttgcacaatttgtgccttggttttcctggcagccctgttccttatctgctatagctgctggggaaactgtttcctgtaccactgctccgattccccgcttccagaatcggcgcatgatcccggcgttgtgggcacctaacggcctgccctgttagctttccaaggaagcagaagacgggaggggaggcattgacataggtcataaagcattggagtttcaaatcccgcagcctcgcgggtgtcacattcctgacggcgcctttttggcctgtgatgttttatccttacaatgtgaataatggcactgaccggtgcttttattgtaaagtcctatagtcgtgggtggtcttgtggttgtgtgtgttctgtccccatctaggtcctggctggccgcatgaccacccctctcgcctcattactgtgaggagtctgggtccatcctggtcagctgccccaatgtgacctggggcagataaaatgccagtctcattgtcacctctgtgacccctccttgtcagggtctccttccttcccagaatgttactgactcctcagtccctcttctggtttccctttatttctcttctacccttttccttttttggggagtacctgtccaagacagggctcatttttgcacttatctcgaatttgaagagattgctgacgcccgagagcctcgctttttcatccttctttccttgttcagcaggctagacagaaacatgtcttgactgttagttgtccacaaatcttcagtattttctccacttcatttttaagaaaggaagcaacagatagatgttgctctttcacctgggtgtctgggctcaagctttcccgcccagcctcacttcctttgcccttcctcctgcctttctcaactgtcccaaggagggggcctcattgtgtctcccgtgcatgctctgcagcattgaagtatggtgtgttcacgtagttctagcagtccccagctgagtgagtgggagagtacctgtgtgtttcgtaacggccttgatccccttgatagatgtttggatattttttggtgtgccctgtgtgtgtgtgtgtgtacaaatacatgtgtatattccttttaaagaagctttatcgaacgtggtctgattttgaggtttagcaatagctagctatatatggtaggtgccgctacagtttttatttagcatggggattgcagagtgaccagcacactggactccgaggtggttcagacaagacagaggggagcagtggccatcatcctcccgccaggagcttcttcgttcctgcgcatatagactgtacgttatgaagaatacccaggaagactttgtgactgtcacttgctgctttttctgcgcttcagtaacaagtgttggcaaacgagactttctcctggcccctgcctgctggagatcagcatgcctgtcctttcagtctgatccatccatctctctcttgcctgaggggaaagagagatgggccaggcagagaacagaactggaggcagtccatctagggaatgggactgtgaggccatacttgtgaaacgtctggactgctattctagagcttttatttggtgtgttcgttgcacagctgtttgaaatgtttaataaagctttataaactttaaaaaaaaaaaaaaaaaa

SEQ ID NO: 455 - DNA, 60 bp, Homo sapiens
ttatcgaacgtggtctgattttgaggtttagcaatagctagctatatatggtaggtgccg

SEQ ID NO: 456 - DNA, 1946 bp, Homo sapiens
gcctcgtcagctgcctgggcgggctgggaggcgcgggttgaaaagtctcgttccaagtttggagagagagagaagagcgcctcagacctcggtacccgcgagcggggaggaggcaggaaagaaggacgcggcgtctggggagcacccaggcagcaagacggggcccgggctttcgacagtggggagtgtgacgcgcttgggaaaggcaggagcgccagcggtcgggctgctcttggctaacgagaggagtccgaggcggcggcgaggggcgaacgacccgacgcaagatggcgagtaaagagatgtttgaagatactgtggaggagcgtgtcatcaatgaagaatataaaatctggaagaagaatacaccgtttctatatgacctggttatgacccatgctcttcagtggcccagtcttaccgttcagtggcttcctgaagtgactaaacctgaaggaaaagattatgcccttcattggctagtgctggggactcatacgtctgatgagcagaatcatctggtggttgctcgagtacatattcccaatgatgatgcacagtttgatgcttcccattgtgacagtgacaagggtgaatttggtggctttggttctgtaacaggaaaaattgaatgtgaaattaaaatcaatcacgaaggagaagtaaaccgtgctcgttacatgccgcagaatcctcacatcattgctacaaaaacaccatcttctgatgtgttggtttttgactatacaaaacaccctgctaaaccagacccaagtggagaatgtaatcctgatctcagattaagaggtcaccagaaggaaggctatggtctctcctggaattcaaatttgagtggacatctcctaagtgcatctgatgaccatactgtttgtctgtgggatataaacgcaggaccaaaagaaggcaaaattgtggatgctaaagccatctttactggccactcagctgttgtagaggatgtggcctggcacctgctgcacgagtcattgtttggatctgttgctgatgatcagaaacttatgatatgggacaccaggtccaataccacctccaagccgagtcacttggtggatgcgcacactgccgaagtcaactgcctctcattcaatccctacagcgaatttattctagccaccggctctgcggataagaccgtagctttatgggatctgcgtaacttaaaattaaaactccataccttcgaatctcataaagatgaaattttccaggtccactggtctccacataatgaaactattctggcttcaagtggtactgaccgccgcctgaatgtgtgggatttaagtaaaattggggaagaacaatcagcagaagatgcagaagatgggcctccagaactcctgtttattcatggaggacacactgctaagatttcagattttagctggaaccccaatgagccttgggtcatttgctcagtgtctgaggataacatcatgcagatatggcaaatggctgaaaatatttacaatgatgaagagtcagatgtcacgacatccgaactggagggacaaggatcttaaacccaaagtacgagaaatgtttctgttgaatgtaatgctacatgaatgcttgatttatcaagcgccaaaaaggcattgtatagtaggaaatgtaagtggggtggcttatggcttctttatcctctgattctagcactttcaagtgagctgttgcgtactgtatcatattgtagctattagggaagagaagaatgttgcttaagaaagaacatcaccattgattttaaatacaagtagcagggtattgcctttgattcaactgttttaagtcctcattttctcaaactaagtgcttgctgttcccaaatatgcaagaataacttttacactttttccttccaacacttcttgattggctttgcagaaataaagttttaaaat

SEQ ID NO: 457 - DNA, 60 bp, Homo sapiens
aagtacgagaaatgtttctgttgaatgtaatgctacatgaatgcttgatttatcaagcgc

SEQ ID NO: 458 - DNA, 1451 bp, Homo sapiens
actgcctggaaacgggctgggcctgcctcggacgccgccggtgtcgcggattctctttccgcccgctccatggcggtggatgcctgactggaagcccgagtgggatgcggctgacgcggaagcggctctgctcgtttcttatcgccctgtactgcctattctccctctacgctgcctaccacgtcttcttcgggcgccgccgccaggcgccggccgggtccccgcggggcctcaggaagggggcggcccccgcgcgggagagacgcggccgagaacagtccactttggaaagtgaagaatggaatccttgggaaggagatgaaaaaaatgagcaacaacacagatttaaaactagccttcaaatattagataaatccacgaaaggaaaaacagatctcagtgtacaaatctggggcaaagctgccattggcttgtatctctgggagcatatttttgaaggcttacttgatcccagcgatgtgactgctcaatggagagaaggaaagtcaatcgtaggaagaacacagtacagcttcatcactggtccagctgtaataccagggtacttctccgttgatgtgaataatgtggtactcattttaaatggaagagaaaaagcaaagatcttttatgccacccagtggttactttatgcacaaaatttagtgcaaattcaaaaactccagcatcttgctgttgttttgctcggaaatgaacattgtgataatgagtggataaacccattcctcaaaagaaatggaggcttcgtggagctgcttttcataatatatgacagcccctggattaatgacgtggatgtttttcagtggcctttaggagtagcaacatacaggaattttcctgtggtggaggcaagttggtcaatgctgcatgatgagaggccatatttatgtaatttcttaggaacgatttatgaaaattcatccagacaggcactaatgaacattttgaaaaaagatgggaacgataagctttgttgggtttcagcaagagaacactggcagcctcaggaaacaaatgaaagtcttaagaattaccaagatgccttgcttcagagtgatctcacattgtgcccggtcggagtaaacacagaatgctatcgaatctatgaggcttgctcctatggctccattcctgtggtggaagacgtgatgacagctggcaactgtgggaatacatctgtgcaccacggtgctcctctgcagttactcaagtccatgggtgctccctttatctttatcaagaactggaaggaactccctgctgttttagaaaaagagaaaactataattttacaagaaaaaattgaaagaagaaaaatgttacttcagtggtatcagcacttcaagacagagcttaaaatgaaatttactaatattttagaaagctcatttttaatgaataataaaagttaattatctttttgagct

SEQ ID NO: 459 - DNA, 60 bp, Homo sapiens
ggcaagttggtcaatgctgcatgatgagaggccatatttatgtaatttcttaggaacgat

SEQ ID NO: 460 - DNA, 2488 bp, Homo sapiens
cttcctctttcactccgcgctcacggcggcggccaaagcggcggcgacggcggcgcgagaacgacccggcggccagttctcttcctcctgcgcacctgccccgctcggtcagtcagtcggcggccggcgcccggcttgtgctcagacctcgcgcttgcggcgcccaggcccagcggccgtagctagcgtctggcctgagaacctcggcgctccggcggcgcgggcaccacgagccgagcctcgcagcggctccagaggaggcaggcgagtgagcgagtccgaggggtggccggggcaggtggtggcgccgcgaagatggtcgccaagcaaaggatccgtatggccaacgagaagcacagcaagaacatcacccagcgcggcaacgtcgccaagacctcgagaaatgcccccgaagagaaggcgtctgtaggaccctggttattggctctcttcatttttgttgtctgtggttctgcaattttccagattattcaaagtatcaggatgggcatgtgaagtgactgaccttaagatgtttccattctcctgtgaattttaacttgaactcattcctgatgtttgataccctggttgaaaacaattcagtaaagcatcctgcctcagaatgactttcctatcatgcttcatgtgtcattccaaggtttcttcatgagtcattccaagttttctagtccataccacagtgccttgcaaaaaacaccacatgaataaagcaataaaatttgattgttaagatacagtagtggaccctacttattcagtcaattaagagtaagtttttttatgtggttattaaaacagtatgaacaattagtctaactctgcatagacagggtctagattttgttaacccaaatgtataactgcagttagcttaaattacaatttgaagtcttgtggtttttatatagctaggcactttattactcttttgaactgaaagcacactcccttataggttcatgtaactgtcctgtaataaggtgcttataaatggaacaactacacagcctagttttgccacaacctttagcatctaaaaagttttaaaagcttctaaatgtctaatataaagggagatgcttatagccacaacatctattttaccaatattgtttccattacactaccttggattttgcatgagtgagtatagtaacccaagatgccataaaaaaaaacttgatcgttttctgacttaattagttactgtggtttcactaaaagctaccgtggtggagtgaagtcagtcagggaaggtttgtttatgttacatttatttcaccagaactattttaatatatcaaaggggtttactatgccaaacaaaattctagggaaaaatactgctaaaaatggatgcctcatcagaacatgctgttgagtccaatgtgccataagacattttagcatgttaaatagcacttttaatagcaaaaaaaggcacatcaactgcgaagttatccttagtttgcaaatgctttttctagattaatgatttttcaatcattagggtactagacacatcagcctaaagtggcatctggaattgaatggatttactgataatgatcagtctttagtcttccctttgttatatgactttataggttatgattgatcaaatttacgttttactaatggtaagggtgagggtcatagggcaggttttgggttttctagtactgttgaaaactgcaagtattggctatttgtatacttagccataacttggtgaaaaaaaacctgagcagtgtctatgtattaatgcgttggaaagaaagctgcttgtgtttgctttgttaattgcctcaggatatttcttttaaaataagctgttttaagaggaacagaagggaaatctgctacctagtctatacacagcgtgaacctcacagggggcttctgataccctcaaacatggagaacagtaagggagcagagtggttaaggactttcaggaacttaactattctggaataaggaatgaatcaactgaccttgggccagcaggtttttaactaaattgttacttgcctttctcacccagttaatcagtctctgtacttgtttccctttttgaaacaagtgtcttggttaactaattctgttttatggttgtgctaaattcatagcaggtgccttattctttgcttttagtcaaaccattccatatcagaattttccttggtttactatagatatttggctttaagttgttgtttgtgttttttaatgtacaatgttctgataaatttgactgttaaattgctatagctagcaatcattttacatatgtaaaaaattgcattccctttgtatttcatgtgtaattcaccaattaagtgcagtttatattcaggttggattatgcatgtttaggtaaacgaaagctgtgtcttacttgatttattctttaaaaataaagttccctgaatatttgaaaaaaaaaaaaaaaaaaaaaaaa

SEQ ID NO: 461 - DNA, 60 bp, Homo sapiens
ttaacttgaactcattcctgatgtttgataccctggttgaaaacaattcagtaaagcatc

SEQ ID NO: 462 - DNA, 1930 bp, Homo sapiens
ggagagagagaggacagagagcaagtcactcccggctgcctttttcacctctgacagagcccagacaccatgaacgcaagtgaattccgaaggagagggaaggagatggtggattacgtggccaactacatggaaggcattgagggacgccaggtctaccctgacgtggagcccgggtacctgcggccgctgatccctgccgctgcccctcaggagccagacacgtttgaggacatcatcaacgacgttgagaagataatcatgcctggggtgacgcactggcacagcccctacttcttcgcctacttccccactgccagctcgtacccggccatgcttgcggacatgctgtgcggggccattggctgcatcggcttctcctgggcggcaagcccagcatgcacagagctggagactgtgatgatggactggctcgggaagatgctggaactaccaaaggcatttttgaatgagaaagctggagaagggggaggagtgatccagggaagtgccagtgaagccaccctggtggccctgctggccgctcggaccaaagtgatccatcggctgcaggcagcgtccccagagctcacacaggccgctatcatggagaagctggtggcttactcatccgatcaggcacactcctcagtggaaagagctgggttaattggtggagtgaaattaaaagccatcccctcagatggcaacttcgccatgcgtgcgtctgccctgcaggaagccctggagagagacaaagcggctggcctgattcctttctttatggttgccaccctggggaccacaacatgctgctcctttgacaatctcttagaagtcggtcctatctgcaacaaggaagacatatggctgcacgttgatgcagcctacgcaggcagtgcattcatctgccctgagttccggcaccttctgaatggagtggagtttgcagattcattcaactttaatccccacaaatggctattggtgaattttgactgttctgccatgtgggtgaaaaagagaacagacttaacgggagcctttagactggaccccacttacctgaagcacagccatcaggattcagggcttatcactgactaccggcattggcagataccactgggcagaagatttcgctctttgaaaatgtggtttgtatttaggatgtatggagtcaaaggactgcaggcttatatccgcaagcatgtccagctgtcccatgagtttgagtcactggtgcgccaggatccccgctttgaaatctgtgtggaagtcattctggggcttgtctgctttcggctaaagggttccaacaaagtgaatgaagctcttctgcaaagaataaacagtgccaaaaaaatccacttggttccatgtcacctcagggacaagtttgtcctgcgctttgccatctgttctcgcacggtggaatctgcccatgtgcagcgggcctgggaacacatcaaagagctggcggccgacgtgctgcgagcagagagggagtaggagtgaagccagctgcaggaatcaaaaattgaagagagatatatctgaaaactggaataagaagcaaataaatatcatcctgccttcatggaactcagctgtctgtggcttcccatgtctttctccaaagccatccagagggttgtgattttgtctgcttagtatctcatcaacaaagaaatattatttgctaattaaaaagttaatcttcatggccatagcttttattcattagctgtgatttttgttgattaaaacattatagattttcatgttcttgcagtcatcagaagtggtaggaaagcctcactgatatattttccagggcaatcaatgttcacgcaacttgaaattatatctgtggtcttcaaattgtcttttgtcatgtggctaaatgcctaataaacaattcaagtga

SEQ ID NO: 463 - DNA, 60 bp, Homo sapiens
gttgattaaaacattatagattttcatgttcttgcagtcatcagaagtggtaggaaagcc

SEQ ID NO: 464 - DNA, 2732 bp, Homo sapiens
gaagctctcctgtttgacgaaagtatgtctcaggaaggtgcggtcccagctagcgcggttcccctggaagaattaagtagctggccagaggagctatgccgccgggaactgccgtccgtcctgccccgactcctctcattgtctcaacattctgaaagttggattgagcatattcactgtgaaattattcgatgacatgatgtatgaattaaccagtcaagccagaggactgtcaagccaaaatttggaaatccagaccactctaaggaatattttacaaacaatggtgcagctcttaggagctctcacaggatgtgttcagcatatctgtgccacacaggaatccatcattttggaaaatattcagagtctcccctcctcagtccttcatataattaaaagcacatttgtgcattgtaagtttcagaccttctccaggctcttttcaaggaggcctattctcttcaaaagcagttaatggaactgctggacatggtttgcatggaccctttagtagatgacaatgatgatattttgaatatggtaatagttattcattctttattggatatctgctctgttatttccagtatggaccatgcatttcatgccaatacttggaagtttataattaagcagagccttaagcaccagtccataataaaaagccagttgaaacacaaagatataattactagcttgtgtgaagacattcttttctccttccattcttgtttacagttagctgagcagatgacacagtcagatgcacaggataatgctgactacagattatttcagaaaacactcaaattgtgtcgtttttttgccaactcccttttgcactacgctaaggaatttcttcctttcctctctgattcttgctgtactttgcaccaactgtatcttcagatacacagcaagtttcctccaagcctttatgctaccaggatttctaaagcacaccaagaggaaatagcaggtgctttcctagtgacactggatccacttatcagtcagctgctcacatttcagcctttcatgcaggtggttttggacagtaaattagacctgccatgtgaactgcagtttccacaatgtcttcttctggttgttgtcatggataagctgccatctcagcctaaggaagtgcaaaccctgtggtgcacagacagccaggtctcagaaacgacaaccaggatatctctactcaaagccgttttctacagttttgagcagtgttctggtgaactctctctacctgttcatttacagggattaaagagtaaggggaaagctgaggtggctgtcaccttgtatcagcatgtttgtgttcatctgtgtacatttattacttcctttcatccctcactgtttgctgaactggatgctgctctgctgaatgctgtacttagtgctaatatgatcacctctttgttagctatggatgcatggtgcttccttgctcgatatgggactgctgaactgtgtgcacaccatgtcaccatagtggctcatctgataaagtcatgccctggagaatgttatcaactcatcaacctatcaatactgttgaagcgtctctttttcttcatggcaccaccccatcagctggagtttatccagaaattttccccaaaagaagcagaaaatctgcctctgtggcaacatatttccttccaggcgttacctcctgagcttagggaacaaactgtccatgaggtcaccacagtaggcactgcagaatgcaggaaatggctgagcaggagtcgtactttgggagaactagaatctctgaacacagtactgtctgctttgcttgcagtatgtaattctgctggtgaagctttggatacaggaaaacaaactgcaattatcgaagttgtgagtcagctttgggcttttttaaacattaaacaggtagcagatcaaccttatgttcaacagacattcagccttttacttccactgttgggatttttcattcaaactctagatcctaaactgatacttcaggcagtaactttgcagaccttgctacttaaattagagcttcctgactatgttcgtttggcaatgttggattttgtatcttctttaggaaaactttttatacctgaagctatccaggacagaattctgcccaacctgtcctgtatgtttgccttactgctagctgacaggagttggctgctagaacaacataccttggaggcgtttactcagttcgctgagggaacaaatcatgaagagatagttccacagtgtctcagttctgaagaaactaagaacaaagttgtatcctttctggagaagactgggtttgtagatgaaactgaagctgccaaagtggaacgtgtgaaacaggaaaaaggtattttctgggaaccctttgctaatgtgactgtagaagaagcaaagaggtcatctttacagccttatgcaaaaagagctcgtcaggagttcccctgggaagaagagtacaggtcagcgctgcatacaatagcaggggctttggaagcaactgagtcactactccaaaagggtcctgctccagcctggctttcaatggaaatggaggcgctccaagaaaggatggataagctaaaacgttacatacatactctagggtgaaacttatcactaggcagaactgggtttgatgctttgtcaactgaaaatacttatgtctgtacattttctaacagatataaaacaaattttgtaaagtt

SEQ ID NO: 465 - DNA, 60 bp, Homo sapiens
ccaagaaaggatggataagctaaaacgttacatacatactctagggtgaaacttatcact

SEQ ID NO: 466 - DNA, 2824 bp, Homo sapiens
ggagctgttgcggggtccgcggggaagtcttggcggtggagccatggtcggccaactgagcgagggggccattgcggccatcatgcagaagggggatacaaacataaagcccatcctccaagtcatcaacatccgtcccattactacggggaatagtccgccgcgttatcgactgctcatgagtgatggattgaacactctatcctctttcatgttggcgacacagttgaaccctctcgtggaggaagaacaattgtccagcaactgtgtatgccagattcacagatttattgtgaacactctgaaagacggaaggagagtagttatcttgatggaattagaagttttgaagtcagctgaagcagttggagtgaagattggcaatccagtgccctataatgaaggactcgggcagccgcaagtagctcctccagcgccagcagccagcccagcagcaagcagcaggccccagccgcagaatggaagctcgggaatgggttctactgtttctaaggcttatggtgcttcaaagacatttggaaaagctgcaggtcccagcctgtcacacacttctgggggaacacagtccaaagtggtgcccattgccagcctcactccttaccagtccaagtggaccatttgtgctcgtgttaccaacaaaagtcagatccgtacctggagcaactcccgaggggaagggaagcttttctccctagaactggttgacgaaagtggtgaaatccgagctacagctttcaatgagcaagtggacaagttctttcctcttattgaagtgaacaaggtgtattatttctcgaaaggcaccctgaagattgctaacaagcagttcacagctgttaaaaatgactacgagatgaccttcaataacgagacttccgtcatgccctgtgaggacgaccatcatttacctacggttcagtttgatttcacggggattgatgacctcgagaacaagtcgaaagactcacttgtagacatcatcgggatctgcaagagctatgaagacgccactaaaatcacagtgaggtctaacaacagagaagttgccaagaggaatatctacttgatggacacatctgggaaggtggtgactgctacactgtggggggaagatgctgataaatttgatggttctagacagcccgtgttggctatcaaaggagcccgagtctctgatttcggtggacggagcctctccgtgctgtcttcaagcactatcattgcgaatcctgacatcccagaggcctataagcttcgtggatggtttgacgcagaaggacaagccttagatggtgtttccatctctgatctaaagagcggcggagtcggagggagtaacaccaactggaaaaccttgtatgaggtcaaatccgagaacctgggccaaggcgacaagccggactactttagttctgtggccacagtggtgtatcttcgcaaagagaactgcatgtaccaagcctgcccgactcaggactgcaataagaaagtgattgatcaacagaatggattgtaccgctgtgagaagtgcgacaccgaatttcccaatttcaagtaccgcatgatcctgtcagtaaatattgcagattttcaagagaatcagtgggtgacttgtttccaggagtctgctgaagctatccttggacaaaatgctgcttatcttggggaattaaaagacaagaatgaacaggcatttgaagaagttttccagaatgccaacttccgatctttcatattcagagtcagggtcaaagtggagacctacaacgacgagtctcgaattaaggccactgtgatggacgtgaagcccgtggactacagagagtatggccgaaggctggtcatgagcatcaggagaagtgcattgatgtgagaggagcagtgccaatcgggcagaagtttgcaaataggcagaatggaatcgatttcctcccacctccgtgtgacgatcccatgttagctacacagtgcagaggctcttgatggtggactaagcaatttcctcccttgtgcgcatctcagaacccatcggtaggcaaaggaaaatacgctcaggtggttgtggtgtagactgtgtcaggcctacggagtcagccagtggctagcgcaagaccagtcactccctctgccttcaggcttctgtcaatttcattatcatcaagcaggaattatgtcgtaagtcactgaccctaactgcagaccatgaagtaaattatgtaactaggtttttgcttctccagtggtgaccaccccccccccatccccgctcacaacttgggttcttctcagcggggcgagctgagaagcggtcatgagcacctggggattttagtaagtgtgtcttcctagaattcgaaggctctctctttctagaggtgctacatagttggtaatgcttggaatggcaatagggtagaatgattaatcaaaggcatatcttctatatctgaagagtatccttccttcagggtttaatagactgagtcagatgggtctgatattaatcaaaattgtctcttctgaggaccgctgataagcattgacttgctgtcccctaaggaaatccgagcggctacaaagcgtttctttacttttcacttcaattaatgctgcgcttcgcttggtgagtgcgtactttttctacctgtacacattcctgcattcatgtattttgttttttttgactaaagctatgttacatggaaaggattttgaagccttttgtttcccttgctttgttttaataaacagtatattctttggttgtgaatcctaaaaaaaaaaaaaaaaaaaaaaaaaaaaa

SEQ ID NO: 467 - DNA, 60 bp, Homo sapiens
tctgtcaatttcattatcatcaagcaggaattatgtcgtaagtcactgaccctaactgca

SEQ ID NO: 468 - DNA, 2143 bp, Homo sapiens
gaagccaacaagaatttgagaactgtaaataccaagccttgaaagggaccatggtgcggcctgtgagacataagaaaccagtcaattactcacagtttgaccactctgacagtgatgatgattttgtttctgcaactgtacctttaaacaagaaatccagaacagcaccaaaggagttaaaacaagataaaccaaaacctaacttgaacaatctccggaaagaagaaatcccagtacaagagaaaacccctaaaaaaaggatggctttagatgacaagctctaccagagagacttagaagttgcactagctttatcagtgaaggaacttccaacagtcaccactaatgtgcagaactctcaagataaaagcattgaaaaacatggcagtagtaaaatagaaacaatgaataagtctcctcatatctctaattgcagtgtagccagtgattatttagatttggataagattactgtggaagatgatgttggtggtgttcaagggaaaagaaaagcagcatctaaagctgcagcacagcagaggaagattcttctggaaggcagtgatggtgatagtgctaatgacactgaaccagactttgcacctggtgaagattctgaggatgattctgatttttgtgagagtgaggataatgacgaagacttctctatgagaaaaagtaaagttaaagaaattaaaaagaaagaagtgaaggtaaaatccccagtagaaaagaaagagaagaaatctaaatccaaatgtaatgctttggtgacttcggtggactctgctccagctgccgtcaaatcagaatctcagtccttgccaaaaaaggtttctctgtcttcagataccactaggaaaccattagaaatacgcagtccttcagctgaaagcaagaaacctaaatgggtcccaccagcggcatctggaggtagcagaagtagcagcagcccactggtggtagtgtctgtgaagtctcccaatcagagtctccgccttggcttgtccagattagcacgagttaaacctttgcatccaaatgccactagcacctgagtgtggtacaggaggaatgtttggttgggagaatcacagctttacaagggtgtttatatttgatttgtgtttatatttgaggcaggtattgtaatataaaggaatccattaccatgtcctataaatgacctctagccattttatgattatgttctctgtaaaactcttcaagacttcaatgagaagtttgtttataagaattatcttctcatacctttccttgtgaagagcgtattctgtttttctatcagttcgacatgaagtccacatcacatgctgttcttttctagttacatgatgtgcctttctagctttgtctagtttatagcaccttaactttaactgttcagttttatctggcagaggaaacattcttatttctttcagaagacatttctgaaatcttataagctacttaagctacgttgtcagttttatcgcaaagatgttttgtattttagccaaatctttttatagtacaaacttagaattattttacacactaaaatggttgcagttttatggcatatgtctccgatttagatggttgttctctagaaaatagtatttaaagacattttatgaaatcttcattgtcaaaacctttaataaaagtggaaatattttgaaatgccctttttcttgataccactcatccacgtgttcctgattgtccacatttcatgataaaatgagagctctgcagagaatgttagcctttctgttgtaaatgtaatcttcaagtagtcactttttgttaagttctttagaaagtagttgtcaagtacttagtcatccctattatgatatgagatagtacagcttttcaggaagcttagatctgaatttactttgaaaaacaattgtaatgaatattttatatttacattgagaatttcaactagcttctgatcaatttttaataaaaaattttcaaatcatgttagctgttaaaaaatgtataataactcagtttttcttggtttatggaaatatctatattaatgtgaaaataattaatttagaattgtgattaaagtgagcatttgtctatcaaaaaaaaaaaaaaaaaaaaaaaaaaaaaa

SEQ ID NO: 469 - DNA, 60 bp, Homo sapiens
gacctctagccattttatgattatgttctctgtaaaactcttcaagacttcaatgagaag

SEQ ID NO: 470 - DNA, 2114 bp, Homo sapiens
gggcgtggttcgagagcgcgcagagtccagactggcggcagggcccgaggggccgacccgcagcgtccctggtctctccagccctcactcggaaccgcactgacaataccctcccctcccttgggctggacccctctctacagctaggagccaatggcagaagacaaaaccaaaccgagtgagttggaccaagggaagtatgatgctgatgacaacgtgaagatcatctgcctgggagacagcgcagtgggcaaatccaaactcatggagagatttctcatggatggctttcagccacagcagctgtccacgtacgccctgaccctgtacaagcacacagccacggtagatggaaggaccatccttgtggacttttgggacacggcaggccaggagcggttccagagcatgcatgcctcctactaccacaaggcccacgcctgcatcatggtgtttgatgtacagaggaaagtcacctataggaacctgagcacctggtatacagagcttcgggagttcaggccagagatcccatgcatcgtggtggccaataaaattgatgacataaacgtgacccaaaaaagcttcaattttgccaagaagttctccctgcccctgtatttcgtctcggctgctgatggtaccaatgttgtgaagctcttcaatgatgcaattcgattagctgtgtcttacaaacagaactcccaggacttcatggatgagatttttcaggagctcgagaacttcagcttggagcaggaagaggaggacgtgccagaccaggaacagagcagcagcatcgagaccccatcagaggaggcggcctctccccacagctgaggggctggggctaggggtgggtggagcccttttaaaatacccttcccttcaacaactctccagctctgaatggagaaactctctaggccatcccctcttctacctcctgcaacccacccatcctattagcctcccacattctaggcccgtgatacagggatgaggtcagcaccagcaaactctggactggtggaagaattccccaccagatctccttgaagcagaagtagggatcagcatcattaacaccttccccaccccctccccgcaggcagacagtgaagagaatcagaaaacatgattatgtgtcactttaatacaggaaatttaggtgttttttggtgtttttgtttttgtttttgtttttgttttctttccaaagctcacctcggggacaattccttgggcttctcctgaggtaatgatttacccccccacccacagctgagtctgtgaggccccatcctttccctacgttttctcccatcttttttcctcttcagtctcccagtcatctggtttgtttgtttctttgttcgttctgagacggagtctcgctctgtcgccaggctggagtgcagtggcgcagtctcggctcgctgcaacctctgactccctggttcaaacgattctcctgcctcagcctcccgagtggctggcatcaccacgcccagctaatttttgtatttttagtagagacggggtttcaccatgttgcccaggatggtctcgatctcctcacctcgtgatccgcccgcctcggcctcccaaagtgctgggattacaggcatgagccaccgcgcccggccccaatcatctgtttttaaacaatcgtttttgagcagatagctattcattccagattttcgtgtacccattctgtttcaggagctcttctaggtaaagctgagatcacaggaacagcaggtgacaggcctagctatagttaggaatacacaagccgtaaaatcgagtccttacagccataccacaaggtacgtccatttggactacaagaagagcttcctttaaagttcctatttcagcataaagaggctgtcctttttttttgaggaatagtttggaccttgtgcctcctgtgggaggctgaggactgcaagaggagagctagcagatatgcctgttcacccctctctggtacttgtggcttgctagtatgtttttatgataatctcgggcattgtttgcattgtgtttattaatagggttttgtttttattgtttccttttttacagtaaaggctgaattacat

SEQ ID NO: 471 - DNA, 60 bp, Homo sapiens
gctatagttaggaatacacaagccgtaaaatcgagtccttacagccataccacaaggtac

SEQ ID NO: 472 - DNA, 2260 bp, Homo sapiens
gaattccgctccgcactgctcactcccgcgcagtgaggttggcacagccaccgctctgtggctcgcttggttcccttagtcccgagcgctcgcccactgcagattcctttcccgtgcagacatggcctctggcaccaccaccaccgccgtgaagattggaataattggtggaacaggcctggatgatccagaaattttagaaggaagaactgaaaaatatgtggatactccatttggcaagccatctgatgccttaattttggggaagataaaaaatgttgattgcatcctccttgcaaggcatggaaggcagcacaccatcatgccttcaaaggtcaactaccaggcgaacatctgggctttgaaggaagagggctgtacacatgtcatagtgaccacagcttgtggctccttgagggaggagattcagcccggcgatattgtcattattgatcagttcattgacaggaccactatgagacctcagtccttctatgatggaagtcattcttgtgccagaggagtgtgccatattccaatggctgagccgttttgccccaaaacgagagaggttcttatagagactgctaagaagctaggactccggtgccactcaaaggggacaatggtcacaatcgagggacctcgttttagctcccgggcagaaagcttcatgttccgcacctggggggcggatgttatcaacatgaccacagttccagaggtggttcttgctaaggaggctggaatttgttacgcaagtatcgccatggcgacagattatgactgctggaaggagcacgaggaagcagtttcggtggaccgggtcttaaagaccctgaaagaaaacgctaataaagccaaaagcttactgctcactaccatacctcagatagggtccacagaatggtcagaaaccctccataacctgaagaatatggcccagttttctgttttattaccaagacattaaagtagcatggctgcccaggagaaaagaagacattctaattccagtcattttgggaattcctgcttaacttgaaaaaaatatgggaaagacatgcagctttcatgcccttgcctatcaaagagtatgttgtaagaaagacaagacattgtgtgtattagagactcctgaatgatttagacaacttcaaaatacagaagaaaagcaaatgactagtaaacatgtgggaaaaaatattacattttaagggggaaaaaaaaaaccccaccattctcttctccccctattaaatttgcaacaataaagggtggagggtaatctctactttcctatactgccaaagaatgtgaggaagaaatgggactctttggttatttattgatgcgactgtaaattggtacagtatttctggagggcaatttggtaaaatgcatcaaaagacttaaaaatacggacgtcctttggtgctgggaactctacatctagcaatttctctttaaaaccatatcagagatgcatacaaagaattatatataaagaagggtgtttaataatgatagttataataataaataattgaaacaatctgaatcccttgcaattggaggtaaattatgtcttagttataatctagattgtgaatcagccaactgaaaatcctttttgcatatttcaatgtcctaaaaagacacggttgctctatatatgaagtgaaaaaaggatatggtagcattttatagtactagttttgctttaaaatgctatgtaaatatacaaaaaaactagaaagaaatatatataaccttgttattgtatttgggggagggatactgggataatttttattttctttgaatctttctgtgtcttcacatttttctacagtgaatataatcaaatagtaaagggccgtaaaaataaaagtggatttagaaagatccagttcttgaaaacactgtttctggtaatgaagcagaatttaagttggtaatattaaggtgaatgtcatttaagggagttacatctttattctgctaaagaagaggatcattgatttctgtacagtcagaacagtacttgggtgtgcaacagctttctgagaaaagctaggtgtataatagtttaactgaaagtttaactatttaaaagactaaatgcacattttatggtatctgatattttaaaaagtaatgtgagcttctcctttttatgagttaaattattttatacgagttggtaatttgtgccttttaataaagtggaagcttgctttttaaaaaaaaaaaaaaa

SEQ ID NO: 473 - DNA, 60 bp, Homo sapiens
acatctttattctgctaaagaagaggatcattgatttctgtacagtcagaacagtacttg

SEQ ID NO: 474 - DNA, 4264 bp, Homo sapiens
atttcccgccagcaggagccgcgcggtagatgcggtgcttttaggagctccgtccgacagaacggttgggccttgccggctgtcggtatgtcgcgacagagcaccctgtacagcttcttccccaagtctccggcgctgagtgatgccaacaaggcctcggccagggcctcacgcgaaggcggccgtgccgccgctgcccccggggcctctccttccccaggcggggatgcggcctggagcgaggctgggcctgggcccaggcccttggcgcgatccgcgtcaccgcccaaggcgaagaacctcaacggagggctgcggagatcggtagcgcctgctgcccccaccagttgtgacttctcaccaggagatttggtttgggccaagatggagggttacccctggtggccttgtctggtttacaaccacccctttgatggaacattcatccgcgagaaagggaaatcagtccgtgttcatgtacagttttttgatgacagcccaacaaggggctgggttagcaaaaggcttttaaagccatatacaggttcaaaatcaaaggaagcccagaagggaggtcatttttacagtgcaaagcctgaaatactgagagcaatgcaacgtgcagatgaagccttaaataaagacaagattaagaggcttgaattggcagtttgtgatgagccctcagagccagaagaggaagaagagatggaggtaggcacaacttacgtaacagataagagtgaagaagataatgaaattgagagtgaagaggaagtacagcctaagacacaaggatctaggcgaagtagccgccaaataaaaaaacgaagggtcatatcagattctgagagtgacattggtggctctgatgtggaatttaagccagacactaaggaggaaggaagcagtgatgaaataagcagtggagtgggggatagtgagagtgaaggcctgaacagccctgtcaaagttgctcgaaagcggaagagaatggtgactggaaatggctctcttaaaaggaaaagctctaggaaggaaacgccctcagccaccaaacaagcaactagcatttcatcagaaaccaagaatactttgagagctttctctgcccctcaaaattctgaatcccaagcccacgttagtggaggtggtgatgacagtagtcgccctactgtttggtatcatgaaactttagaatggcttaaggaggaaaagagaagagatgagcacaggaggaggcctgatcaccccgattttgatgcatctacactctatgtgcctgaggatttcctcaattcttgtactcctgggatgaggaagtggtggcagattaagtctcagaactttgatcttgtcatctgttacaaggtggggaaattttatgagctgtaccacatggatgctcttattggagtcagtgaactggggctggtattcatgaaaggcaactgggcccattctggctttcctgaaattgcatttggccgttattcagattccctggtgcagaagggctataaagtagcacgagtggaacagactgagactccagaaatgatggaggcacgatgtagaaagatggcacatatatccaagtatgatagagtggtgaggagggagatctgtaggatcattaccaagggtacacagacttacagtgtgctggaaggtgatccctctgagaactacagtaagtatcttcttagcctcaaagaaaaagaggaagattcttctggccatactcgtgcatatggtgtgtgctttgttgatacttcactgggaaagtttttcataggtcagttttcagatgatcgccattgttcgagatttaggactctagtggcacactatcccccagtacaagttttatttgaaaaaggaaatctctcaaaggaaactaaaacaattctaaagagttcattgtcctgttctcttcaggaaggtctgatacccggctcccagttttgggatgcatccaaaactttgagaactctccttgaggaagaatattttagggaaaagctaagtgatggcattggggtgatgttaccccaggtgcttaaaggtatgacttcagagtctgattccattgggttgacaccaggagagaaaagtgaattggccctctctgctctaggtggttgtgtcttctacctcaaaaaatgccttattgatcaggagcttttatcaatggctaattttgaagaatatattcccttggattctgacacagtcagcactacaagatctggtgctatcttcaccaaagcctatcaacgaatggtgctagatgcagtgacattaaacaacttggagatttttctgaatggaacaaatggttctactgaaggaaccctactagagagggttgatacttgccatactccttttggtaagcggctcctaaagcaatggctttgtgccccactctgtaaccattatgctattaatgatcgtctagatgccatagaagacctcatggttgtgcctgacaaaatctccgaagttgtagagcttctaaagaagcttccagatcttgagaggctactcagtaaaattcataatgttgggtctcccctgaagagtcagaaccacccagacagcagggctataatgtatgaagaaactacatacagcaagaagaagattattgattttctttctgctctggaaggattcaaagtaatgtgtaaaattatagggatcatggaagaagttgctgatggttttaagtctaaaatccttaagcaggtcatctctctgcagacaaaaaatcctgaaggtcgttttcctgatttgactgtagaattgaaccgatgggatacagcctttgaccatgaaaaggctcgaaagactggacttattactcccaaagcaggctttgactctgattatgaccaagctcttgctgacataagagaaaatgaacagagcctcctggaatacctagagaaacagcgcaacagaattggctgtaggaccatagtctattgggggattggtaggaaccgttaccagctggaaattcctgagaatttcaccactcgcaatttgccagaagaatacgagttgaaatctaccaagaagggctgtaaacgatactggaccaaaactattgaaaagaagttggctaatctcataaatgctgaagaacggagggatgtatcattgaaggactgcatgcggcgactgttctataactttgataaaaattacaaggactggcagtctgctgtagagtgtatcgcagtgttggatgttttactgtgcctggctaactatagtcgagggggtgatggtcctatgtgtcgcccagtaattctgttgccggaagataccccccccttcttagagcttaaaggatcacgccatccttgcattacgaagactttttttggagatgattttattcctaatgacattctaataggctgtgaggaagaggagcaggaaaatggcaaagcctattgtgtgcttgttactggaccaaatatggggggcaagtctacgcttatgagacaggctggcttattagctgtaatggcccagatgggttgttacgtccctgctgaagtgtgcaggctcacaccaattgatagagtgtttactagacttggtgcctcagacagaataatgtcaggtgaaagtacattttttgttgaattaagtgaaactgccagcatactcatgcatgcaacagcacattctctggtgcttgtggatgaattaggaagaggtactgcaacatttgatgggacggcaatagcaaatgcagttgttaaagaacttgctgagactataaaatgtcgtacattattttcaactcactaccattcattagtagaagattattctcaaaatgttgctgtgcgcctaggacatatggcatgcatggtagaaaatgaatgtgaagaccccagccaggagactattacgttcctctataaattcattaagggagcttgtcctaaaagctatggctttaatgcagcaaggcttgctaatctcccagaggaagttattcaaaagggacatagaaaagcaagagaatttgagaagatgaatcagtcactacgattatttcgggaagtttgcctggctagtgaaaggtcaactgtagatgctgaagctgtccataaattgctgactttgattaaggaattatagactgactacattggaagctttgagttgacttctgaccaaaggtggtaaattcagacaacattatgatctaataaactttattttttaaaaatga

SEQ ID NO: 475 - DNA, 60 bp, Homo sapiens
gaaaagcaagagaatttgagaagatgaatcagtcactacgattatttcgggaagtttgcc

SEQ ID NO: 476 - DNA, 2174 bp, Homo sapiens
ccccgccttctcgctgcccagccccggggagggaggcggggccgcgaccccggcgcgggtggggcgaatgcgttcccagcgggtagcctggggctggtgcagagttccaagcccacggccccggtcgcggcctcgccgccctcccgcgccccgcgccgggagcgggcctagagcgctcgcctcgcccctccgcgagcagggctctggcgcccgcccctgtccgcaccgctggcagcctgaagagagtcgctggccgtggtcgccgctaggtaggatatatctgcatcttgaaaggaagataaaacaaaagccttctttggaatagatggatttttgtcactttctgtgtgaactaaagtgattcaatgtctcttttggattgcttctgcacttcaagaacacaagttgaatcactcagacctgaaaaacagtctgaaaccagtatccatcaatacttggttgatgagccaaccctttcctggtcacgtccatccactagagccagtgaagtactatgttccaccaacgtttctcactatgagctccaagtagaaataggaagaggatttgacaacttgacttctgtccatcttgcacggcatactcccacaggaacactggtaactataaaaattacaaatctggaaaactgcaatgaagaacgcctgaaagctttacagaaagccgtgattctatcccactttttccggcatcccaatattacaacttattggacagttttcactgttggcagctggctttgggttatttctccatttatggcctatggttcagcaagtcaactcttgaggacctattttcctgaaggaatgagtgaaactttaataagaaacattctctttggagccgtgagagggttgaactatctgcaccaaaatggctgtattcacaggagtattaaagccagccatatcctcatttctggtgatggcctagtgaccctctctggcctgtcccatctgcatagtttggttaagcatggacagaggcatagggctgtgtatgatttcccacagttcagcacatcagtgcagccgtggctgagtccagaactactgagacaggatttacatgggtataatgtgaagtcagatatttacagtgttgggattacagcatgtgaattagccagtgggcaggtgcctttccaggacatgcatagaactcagatgctgttacagaaactgaaaggtcctccttatagcccattggatatcagtattttccctcaatcagaatccagaatgaaaaattcccagtcaggtgtagactctgggattggagaaagtgtgcttgtctccagtggaactcacacagtaaatagtgaccgattacacacaccatcctcaaaaactttctctcctgccttctttagcttggtacagctctgtttgcaacaagatcctgagaaaaggccatcagcaagcagtttattgtcccatgttttcttcaaacagatgaaagaagaaagccaggattcaatactttcactgttgcctcctgcttataacaagccatcaatatcattgcctccagtgttaccttggactgagccagaatgtgattttcctgatgaaaaagactcatactgggaattctagggctgccaaatcattttatgtcctatatacttgacactttctccttgctgctttttcttctgtatttctaggtacaaataccagaattatacttgaaaatacagttggtgcactggagaatctattatttaaaaccactctgttcaaaggggcaccagtttgtagtccctctgtttcgcacagagtactatgacaaggaaacatcagaattactaatctagctagtgtcatttattctggaatttttttctaagctgtgactaactctttttatctctcaatataatttttgagccagttaatttttttcagtattttgctgtcccttgggaatgggccctcagaggacagtgcttccaagtacatcttctcccagattctctggcctttttaatgagctattgttaaaccaacaggctagtttatcttacatcagacccttttctggtagagggaaaatgtttgtgctttccctttttcttctgttaatacttatggtaacacctaactgagcctcactcacattaaatgattcacttgaaatatatacag

SEQ ID NO: 477 - DNA, 60 bp, Homo sapiens
cagagtactatgacaaggaaacatcagaattactaatctagctagtgtcatttattctgg

SEQ ID NO: 478 - DNA, 1743 bp, Homo sapiens
ggcgcggggacgcgggtttctgcctcaggccctgccctgctctactctgcgctctctgcccgcgccgccgccgcctcagcctcggccctgcgctgcgcgcccggcccgtgctgccatggcctgccgcccgcgaagcccgccgaggcatcagagccgctgcgacggtgacgccagcccgccgtcccccgcgcgatggagcctgggacggaagcgcagagccgacggcaggcgctggaggcccgaagacgccgaggaggcagagcaccgcggcgccgagcgcagacccgagagctttaccactcctgaaggccctaaaccccgttccagatgctctgactgggcaagtgcagttgaagaagatgaaatgaggaccagagttaacaaagaaatggcaagatataaaaggaaactcctcatcaatgactttggaagagagagaaaatcatcatcaggaagttctgattcaaaggagtctatgtctactgtgccggctgactttgagacagatgaaagtgtcctaatgaggagacagaagcagatcaactatgggaagaacacaattgcctacgatcgttatattaaagaagtcccaagacaccttcgacaacctggcattcatcccaagacccctaataaatttaagaagtatagtcgacgttcatgggaccagcaaatcaaactctggaaggtggctctgcatttttgggatcctccagcggaagaaggatgtgatttgcaagaaatacaccctgtagaccttgaatctgcagaaagcagctccgagccccagaccagctctcaggatgactttgatgtgtactctggcacacccaccaaggtgagacacatggacagtcaagtggaggatgagtttgatttggaagcttgtttaactgaacccttgagagacttctcagccatgagctaactgccccctggcggccaggaagagaaacagctcctccccgactaggtggaaggctggccaggcaccaagcatgtgtgtgcacttgtacctggtggtttctctgttagcagtccattagctcatgctgaattatttttgccttactttcttaagaaacattaattttatgtatagtgagtatattttgcatgttttaaattgtaaatggagctaagtccaagaaagtacttgaagctctcttccagcgagcttaattgcgtaatccctgttgtcctccagggtaagctgacacgtctacataactggttttccacaggcatcttcagttattgcttgtcaggtggactgttttggatttaaccatgtaatccatgggaccaattgagagtcagctacttttataggcatcaaagtattctcagacacctttaatatctttatggaaacttaatttttggccttttatcaatatgtcataacagcattctgaagtcagacattgttaaattgagctattaaactaatgagttttatgtaagttatatggtcttaatttggtacttgtaaatagcactagttagactctttagaatactccaagagttagggcagcagagtggagcgatttagaaagaacattttaaaacaatcagttaatttaccatgtaaaattgctgtaaatgataatgtgtacagattttctgttcaaatattcaattgtaaacttcttgttaagactgttacgtttctattgcttttgtatgggatattgcaaaaataaaaaggaaagaaccctcaaaaaaaaaaaaaaaaaa

SEQ ID NO: 479 - DNA, 60 bp, Homo sapiens
atttggtatttgtaaatagcactagttagactctttagaatactccaagagttagggcag

SEQ ID NO: 480 - DNA, 1389 bp, Homo sapiens
cgcggacttctgccaagcaccggctcatgtgaggctcgcggcacagcgttctctgggctccccagaagccagcctttcgctcccggacccggcagcccgagcaggagccgtgggaccgggcgccagcaccctctgcggcgtgtcatgggcccgcgccgccggagccgaaagcccgaggccccgaggaggcgcagcccgagcccgaccccgacccccggcccctcccggcggggcccctccttaggcgcttcctcccatcaacacagtcggcggagacaaggttggctaaaggagatccgaaagcttcagaagagcacacacctcttgataaggaagctgcccttcagccgcctggcaagagaaatatgtgttaaattcactcgtggtgtggacttcaattggcaagcccaggccctattggccctacaagaggcagcagaagcatttctagttcatctctttgaggacgcctatctcctcaccttacatgcaggccgagttactctcttcccaaaggatgtgcaactggcccggaggatccggggccttgaggagggactcggctgagctcctgcacccagtgtttctgtcagtctttcctgctcagccaggggggatgataccggggactctccagagccatgactagatccaatggattctgcgatgctgtctggactttgctgtctctgaacagtatgtgtgtgttgctttaaatatttttcttttttttgagaaggagaagactgcatgactttcctctgtaacagaggtaatatatgagacaatcaacaccgttccaaaggcctgaaaataattttcagataaagagactccaaggttgactttagtttgtgagttactcatgtgactatttgaggattttgaaaacatcagatttgctgtggtatgggagaaaaggttatgtacttattattttagctctttctgtaatatttacattttttaccatatgtacatttgtacttttattttacacataagggaaaaaataagaccactttgagcagttgcctggaaggctgggcatttccatcatatagacctctgcccttcagagtagcctcaccattagtggcagcatcatgtaactgagtggactgtgcttgtcaacggatgtgtagcttttcagaaacttaattggggatgaatagaaaacctgtaagctttgatgttctggttacttctagtaaattcctgtcaaaatcaattcagaaattctaacttggagaatttaacattttactcttgtaaatcatagaagatgtatcataacagttcagaattttaaagtacattttcgatgcttttatgggtatttttgtagtttctttgtagagagataataaaaatcaaaatatttaatga

SEQ ID NO: 481 - DNA, 60 bp, Homo sapiens
ggggatgaatagaaaacctgtaagctttgatgttctggttacttctagtaaattcctgtc

SEQ ID NO: 482 - DNA, 1946 bp, Homo sapiens
aggttcgaatctccgccgcttcgcggttgcttctcaacgtccgggccgcatctcggcggcggcgagggctgagcgcgggagctgcctccgagccggagccccagccctaggccctgcgcgagctgccccgccctaccccctccagcgtcctgtcgcctcctcgcccgacttcggcctgtccctctctcgcgcgctcagtcctcgctcttcgccccccgcagctatcggcactcggtctcccgcgcctggcgggctccgcccgagcctctgggcccatggccaagcggcgtgcggccgagccggtgacgttccacgtgccttggaagcggctcctgctttgcgacttcgctgagcagccgccgccaccgcctctctggatccggccgcccggggtcgcgcatgctgggcagctcctcggcgtcccagagcagcaccgaaagcgcaaaatcgacgcagggaccatggcagagccctcggcttcgcccagcaagcgccgtgacagcggggacaacagcgccccgagcggccaggagcgtgaggaccacggtctggagacaggcgatccgccgctgccgccgccgcccgtactgccggggccgggggaggagctcccgggcgcccggctcccggggggcggtggcgacgacggggcggggcgcgcaggacccccgcggggagactggggggtcgcatcgtgccagcacaatgaagaattttggcagtataataccttccaatactggaggaatcctttgcctcctattgatctggcagacattgaagatttaagtgaagacaccctgacagaagcaacacttcagggcaggaatgaaggggctgaggttgacatggagtcctgatgtaaggagccgaagcagtgggattggctgatttgaggagatgtctctaagtgaattctcgtattcttaagggaaaagttattttccatacttgaagttatatttccaaacctgagaaatgaagaaagattgttctgacattaaatacctacagttactactgaacctcttaataaggatttgtcaaggatagagtacagttgtaggggaagtattttatgtatgcattcttagagcaaaaagttttgtttaaattctagaattgaaggtactgatcttataaaaagaaattctagcagttttagaaataggtgggaaaaactcaaatattcctcctatctgcaccaaaaagtttatttgtggtatataaaatgaatattgttttataataacttgttaataaagtactttctaatacattctattgactctgttagttgaacaaatagctgacttgaacatctatgcaaacttaagatgggcgggattgttgtaaaagctattgttttaaaagagctttctaaatgtaaagtagtgataatttcaatttgggtagcgtgtttgcaaagcttccaatatttgatgttggttaagctctactatgggcaactgaagatggataaagaaaaatgaaaactgaatcggtgcctgcttccccctgttttcccaggattagaggaaaaaatttattgtataatcagcttcttggttttgaattgcttcgaggcatggttttattccttattactttagacctgtagttttcaacactgacagcactttaaaaatctttgcctgggcctcactcttgagagattctcatttaatagttctgaggtgggtcttggatataactatttttttaaacacctgtcctgtttccctccattcctctcatgtgcagacagggttgagaaccagtagactaatggtcgtttttcctgtttaaaggagataactaatttgagctgaagcaatgcttcttaattagctttgtttttgttttgctctgttggtggctttgttacaactgaattattgtgttattactatttcattgttaaagaaataaagtaagcaatttgt

SEQ ID NO: 483 - DNA, 60 bp, Homo sapiens
gtagactaatggtcgtttttcctgtttaaaggagataactaatttgagctgaagcaatgc

SEQ ID NO: 484 - DNA, 815 bp, Homo sapiens
atgtcttccaaccaggacctctggatcaatggtagtcctggtggtctaaacatgttcttgaaagaagcaagagaaatcaagattgacgaaggagcaacaaagcttggaaagatatttgtctctgggaagaatcttccaggccctttcaggaagttgaagggagaaggtggtctttctcagagccactgcttgagcgcttatgcatcccatggtgtggtctacctggctcaacctctccaagctcttgataaccagtattacaaggtcaaggagctctcgcgagactttcaggggtcggagcgcgggggccggccgagaggaaagctggaggcgcgggtggggaacatgtctgagtcggagctcggcaggaagtgggaccggtgtctggcggatgcggtcgtgaagataggtactggttttggattaggaattgttttctcacttaccttctttaaaagaagaatgtggccattagccttcggttctggcatgggattaggaatggcttattccaactgtcagcatgatttccaggctccatatcttctacatggaaaatatgtcaaagagcaggagcagtgacttcacctgagaacatcccagcgggaggacaagagaaatcatgtttattcctcaggaatactgaagtgccctggagtaagctgccattcttctgtaacaatgttatcagtaatgctttaaactccagcacctggttatgcatttgaaaccaagtctgtttcttgttttgtattttctctctggaagttgtaaggaggtggtcttaaataaattaaacaaaaagaggaagtcca

SEQ ID NO: 485 - DNA, 60 bp, Homo sapiens
aaccaacccataattgcattttacttgtcgtggttcgatctgattgtattgtcgaaggac

SEQ ID NO: 486 - DNA, 2341 bp, Homo sapiens
agtgtaagcagtgtgcaaacaaggtgttacagcacatgaaggccgtgcaggcagatcaggagcgggagaggcagcggcggctggaagtagaacgtgaggcagagaagaagcgtgaggctaagcagcgagctaaggaagctcaggagcgggaactgcggaagcgggagaaggcggaagagaaggagcgccggagaaaggagtatgatgccctcaaagcagccaagcgggagcaggagaagaaacctaagaaggaagcaaatcaggccccgaaatctaagtctggctcccgtccccgcaagccaccaccccggaagcacactcgttcctgggctgtgctgaagctgctgctgctgctgctgctatttggtgtggcgggagggctggttgcttgtcgggtgacagagctgcagcagcagcccctctgcaccagcgtgaacaccatctatgacaatgcggtccagggtctacgccgccatgagatcctccagtgggtccttcagaccgactctcagcagtgagcttgttcccagcacctgctgcctcccagccttggagtttggattcctatggaattgggttctgctggacacaacctctttttagcatcagacctacctgccatcatcaaatggctgcagattggtacatgagacctcctctttgtaggacttcttcattccttagtcagggttccctgaaggaatgaggagaaatgggaggtggcgggggggcgtggggggcagttacctgcatgcctaaaggagtaggcttgggggtggggagagagaaaacatagccttttctagttgttatataaagctgtgtaaaggcaaggctcgtttctactaaatggtcagctgtcactacatttatacttttgtatgccacaaaccctttcattcctccctgggaatcagggtagatcaggaggaactgggggggactagaacaccacgctcagtaaatccagtctaaactgggaggtaggggtattcctgttttctttaggacctcagagatgtaagcattttagcagccacacaaaatctctggctatgaaagggacttcatgaccatccagtccaatataacacttgcagacagagaaactgaggtcttccatgacttgcctagtctcccagctagtttgaggcaaaactggattcccactctggtattctttcttccctttacatcattttccctcctttataatgtcctgagagaccagaactcacaccagaatcgattattcctcaggtgaagcatagactctttcatggtagacagatttcacgactcagagatagaaatctcttgctatcatcaggtcacgggcagctcctgtggagtcctgcccaacttatgtggcttccataaaatggcaacagtccaggctccttgcctaattttagagcattaactccctaattgccagtaagcaaggaggtggatctctgcaaacctacactgtctatgacagctctagttgtacttggtgtgactaaatacctcaaaggcaacctgcttctgcaggttttgaagtgtcagcttcataagacactgaggtttagaattgtttgattctagaccataactgaagggcataaatggaaacaggatatgaagggaaacaagtagcatcatggagctgaaaagtggtgcatcacccaatggctagcacaaacaaggatcacactgtccattctcttgtctgctaaattaagcattttcttgcctcctttgcttcatcttttcacaacagctggatagagggatcagaaatgactgtgtcatggtgctcattcactgcaaactcccagttgcaagctccttggctcccccggagggagcaagaatctcatagttcagagacacagagggccttttagccctaatgaccttttggatgggactgcaactcatgactatcctgatattggaagaaaggactttgttaatcttctcccccatagctctgctgcgtaggtctacatcttactcagaatcactacacattcctttagtcttcctccaagctccagagccattggtacaaatgctttattgaaactaaatacataatacacacaatgagatgaagacaatatagaagtccgcatagtcatcataatcccgttccttggccggttgaggcagctcagtggctgagcccagtcaagccaacccgcagcttcactcacgacttcaagatttgatgctaattcttttggatttctacagttattaaataagtgtctgagtggacaaaaaaaaaaaaaaaaaaaaaaaaaaaaaaaaaaaaaaaaaaaaaaaaaaaaaaaaaaaaaaaaaaaaaaaa

SEQ ID NO: 487 - DNA, 60 bp, Homo sapiens
tacataatacacacaatgagatgaagacaatatagaagtccgcatagtcatcataatccc

SEQ ID NO: 488 - DNA, 1339 bp, Homo sapiens
gggggggctgttaccattgagtgaccagaaaggctctcggtgcaaagcgttcctgcagaattgcttccacgtaaagggaccttcgggaaatttcgctggataccggctggcattgacaaacccagcgtccctgagccttgtgaggtttccaggcaggctgattgcgaggcaacatgtctgcttcggtgaaagaaagccttcagcttcagctactggagatggaaatgctgttttctatgtttcctaaccaaggagaagtaaaacttgaagatgtaaatgccctgacgaatataaagaggtatttggaaggcacaagggaggcgctgccaccaaaaatcgaatttgtaattacactccagattgaagagcccaaggtgaaaattgatttgcaagtgaccatgcctcacagctacccctatttagcattgcagctgtttggacggtcatctgaacttgacagacatcagcagctacttctcaacaaaggtctcacttcttacatagggacttttgatccaggtgagctctgtgtatgtgcagcaatccagtggctacaggacaacagtgcatcttatttcctgaacagaaagcttgtatatgaaccatctacacaagcaaagccagtcaagaacacattcctccgaatgtggatctacagtcaccatatatatcagcaggacctaaggaaaaagattttggatgttgggaaaaggttagatgtgactggattttgcatgacaggaaagcctggtataatctgtgtggagggtttcaaagagcactgtgaggagttctggcacacaattaggtaccccaattggaagcacatttcctgtaagcatgctgaaagcgtggagacagaaggaaatggtgaggacctgcgccttttccattcttttgaagagttactccttgaggctcatggtgactatggattaaggaatgactatcacatgaatctgggccaattcttagaatttctcaagaagcacaaaagtgagcatgtttttcagatactatttggtattgaaagcaaaagttcagactcataaaaagcgattaagaggcctatgcctgtaatttcactaagtcagtatttctgttaataagaccaaattaaaaaggctagtggctgtgtagcatcctcagtgcaaaacccagctccagaattttcacctggtaacgaatttcaactgacagtgaaatgaataggcctttaaactttataacattgcaattgtgatgttatctctaggtttttgtgtgaagtcattcaaaaactatttcattgtaaattaataaaaacaatccaaaaaaaaaaaaaaaaaaaaaaaaaaaa

SEQ ID NO: 489 - DNA, 60 bp, Homo sapiens
cctcatttctgacctactgaatgctcagctgtttggcatttcctttgaatgacccagcat

SEQ ID NO: 490 - DNA, 1383 bp, Homo sapiens
gcggtggcagtttgccgcgggtgtgtgaagggagacagtgtggaggccacagggtactcgccacgatgagcagcaccttagctaagatcgcggagatagaagcagagatggctcggactcaaaagaacaaggccacagcacaccacttagggctgcttaaggctcgtcttgctaagcttcgtcgagaactcattactccaaagggtggtggtggtggaggtccaggagaaggttttgatgtggccaagacaggtgatgctcgaattggatttgttggttttccatctgtggggaagtcaacactgcttagtaacctggcaggggtatattctgaggtggcagcctatgaattcactactctgaccactgtgcctggtgtcatcagatacaaaggtgccaagatccagctcctggatctcccaggtatcattgaaggtgccaaggatgggaaaggtagaggtcgtcaagtcattgcagtggcccgaacctgtaacttgatcttgattgttctggatgtcctgaaacctttgggacataagaagataattgaaaatgagctggaaggctttggcattcgcttgaacagcaaaccccccaacattggctttaagaagaaggacaagggaggcattaatctcacagccacttgcccccagagtgagctggatgctgaaactgtgaagagcattctggctgaatacaagattcataatgccgatgtgactctacgtagtgatgctacagctgatgacctcattgatgtggtggaaggaaacagagtttatatcccctgtatctatgtgttaaataagattgaccaaatctccattgaggaattggatatcatctataaggtgcctcactgtgtacccatctctgcccatcaccgctggaattttgatgacctattggaaaagatctgggactatctgaaactagtgagaatttacaccaaacccaaaggccagttaccagattacacatccccagtggtgcttccttactccaggaccacagtggaggatttctgcatgaagattcacaaaaatcttatcaaagaatttaaatatgctctggtctggggtctctctgtgaaacacaatcctcagaaagtgggtaaagaccatacgttggaggatgaggatgtcattcaaattgtgaagaagtgaaacctttcccttttcccatctgccggacgaaccacaacagcgttccccatgatcaagcaccctaccccagttctttctggttttggcagtcactggatcaggatccaggggagggagatggaggcacccaaactggaacttcatttgtcttaccttggtgtcaccttgtatgtcgaactgcataaaagatctggtaggctggtcagctacatgc

SEQ ID NO: 491 - DNA, 60 bp, Homo sapiens
ggaattttgatgacctattggaaaagatctgggactatctgaaactagtgagaatttaca

SEQ ID NO: 492 - DNA, 1750 bp, Homo sapiens
tggtaactcaggcgccgggcgcactgtccgtagctgctggttttccacgctggttttagctcccggcgtctgcaaaatgaagattgaggaggtgaagagcactacgaagacgcagcgcatcgcctcccacagccacgtgaaagggctggggctggacgagagcggcttggccaagcaggcggcctcagggcttgtgggccaggagaacgcgcgagaggcatgtggcgtcatagtagaattaatcaaaagcaagaaaatggctggaagagctgtcttgttggcaggacctcctggaactggcaagacagctctggctctggctattgctcaggagctgggtagtaaggtccccttctgcccaatggtggggagtgaagtttactcaactgagatcaagaagacagaggtgctgatggagaacttccgcagggccattgggctgcgaataaaggagaccaaggaagtttatgaaggtgaagtcacagagctaactccgtgtgagacagagaatcccatgggaggatatggcaaaaccattagccatgtgatcataggactcaaaacagccaaaggaaccaaacagttgaaactggaccccagcatttttgaaagtttgcagaaagagcgagtagaagctggagatgtgatttacattgaagccaacagtggggccgtgaagaggcagggcaggtgtgatacctatgccacagaattcgaccttgaagctgaagagtatgtccccttgccaaaaggggatgtgcacaaaaagaaagaaatcatccaagatgtgaccttgcatgacttggatgtggctaatgcgcggccccaggggggacaagatatcctgtccatgatgggccagctaatgaagccaaagaagacagaaatcacagacaaacttcgaggggagattaataaggtggtgaacaagtacatcgaccagggcattgctgagctggtcccgggtgtgctgtttgttgatgaggtccacatgctggacattgagtgcttcacctacctgcaccgcgccctggagtcttctatcgctcccatcgtcatctttgcatccaaccgaggcaactgtgtcatcagaggcactgaggacatcacatcccctcacggcatccctcttgaccttctggaccgagtgatgataatccggaccatgctgtatactccacaggaaatgaaacagatcattaaaatccgtgcccagacggaaggaatcaacatcagtgaggaggcactgaaccacctgggggagattggcaccaagaccacactgaggtactcagtgcagctgctgaccccggccaacttgcttgctaaaatcaacgggaaggacagcattgagaaagagcatgtcgaagagatcagtgaacttttctatgatgccaagtcctccgccaaaatcctggctgaccagcaggataagtacatgaagtgagatggctgaggttttcagcagcaagagactccccaggtgtgcctggcctgggtccagcctgtgggcgcttgcccctgggcttggggctgccgtccccactcaggcgtgggctgcagcgctgtcagttcagtgtggaaagcatttctttttaagttatcgtaactgttcctgtggttgctttgaaagaacccttccttacctggtgtgttttctataaatcttcataggttattttgattcttctctctctctctctaagttttttaaaaataaacttttcagaacagttaaaaaaaaaaaaaa

SEQ ID NO: 493 - DNA, 60 bp, Homo sapiens
acagcattgagaaagagcatgtcgaagagatcagtgaacttttctatgatgccaagtcct

SEQ ID NO: 494 - DNA, 2273 bp, Homo sapiens
agtgcccgcgcagcgttgagttgcacagcggtattctcaccaggccctgcaatcggtgggccacagtgccggccacagagatggtggaaggaccaggctgtactctgaatggagagaagattcgcgcgcgggtgctcccgggccaggcggtgaccggcgtgcggggaagcgctctgcggagtccgcagggccgcgccttgcggctcgcagcctccacggttgtggtctccccgcaggctgctgcactgaataatgattccagccagaatgtcttgagcctgtttaatggatatgtttacagtggcgtggaaactttggggaaggagctctttatgtactttggaccaaaagctttacggattcatttcggaatgaaaggcttcatcatgattaatccacttgagtataaatataaaaatggagcttctcctgttttggaagtgcagctcaccaaagatttgatttgtttctttgactcatcagtagaactcagaaactcaatggaaagccaacagagaataagaatgatgaaagaattagatgtatgttcacctgaatttagtttcttgagagcagaaagtgaagttaaaaaacagaaaggccggatgctaggtgatgtgctaatggatcagaacgtattgcctggagtagggaacatcatcaaaaatgaagctctctttgacagtggtctccacccagctgttaaagtttgtcaattaacagatgaacagatccatcacctcatgaaaatgatacgtgatttcagcattctcttttacaggtgccgtaaagcaggacttgctctctctaaacactataaggtttacaagcgtcctaattgtggtcagtgccactgcagaataactgtgtgccgctttggggacaataacagaatgacatatttctgtcctcactgtcaaaaagaaaatcctcaacatgttgacatatgcaagctaccgactagaaatactataatcagttggacatctagcagggtggatcatgttatggactccgtggctcggaagtcggaagagcactggacctgtgtggtgtgtactttaatcaataagccctcttctaaggcatgtgatgcttgcttgacctcaaggcctattgattcagtgctcaagagtgaagaaaattctactgtctttagccacttaatgaagtacccgtgtaatacttttggaaaacctcatacagaagtcaagatcaacaggaaaactgcatttggaactacaactcttgtcttgactgattttagcaataaatccagtactttggaaagaaaaacaaagcaaaaccagatactagatgaggagtttcaaaactctcctcctgctagtgtgtgtttgaatgatatacagcacccctccaagaagacaacaaacgatataactcaactatccagcaaagtaaacatatcacctacaatcagttcagaatctaaattatttagtccagcacataaaaaaccgaaaacagcccactactcatcaccagagcttaaaagctgcaaccctggatattctaacagtgaacttcaaattaatatgacagatggccctcgtaccttaaatcctgacagccctcgctgcagtaaacacaaccgcctctgcatcctccgagttgtgaggaaggatggggaaaacaagggcaggcagttttatgcctgtcctctacctagagaagcacaatgtggattttttgaatgggcagatttgtccttcccattctgcaaccatggcaagcgttccaccatgaaaacagtattgaagattggacctaacaatggaaagaatttttttgtgtgtcctcttgggaaggaaaaacaatgcaattttttccagtgggcagaaaatgggccaggaataaaaattattcctggatgctaatatctgtagattctctggcatttagtctcttcaaactgtgtataatgtttggtcctcctctgtttcatagaaaagtcatagaatatctatgatacattgaaaagttactgcaatatttgagaactgttctttttttttcttgtgtgtgccatctttccattgttggctacgtcttttcttttgccttgatgaacgttctatgtatttcatcggatatacagcatattccatttaggatgtgtatttaatgcatttagtaatgacgataaagtgtttttagtatgcttttagtctcttgtaactggggagaagcagtgttttttttttaggaaaggattatgcgacacaataaaataagatattctgtctgtagtg

SEQ ID NO: 495 - DNA, 60 bp, Homo sapiens
gccaggaataaaaattattcctggatgctaatatctgtagattctctggcatttagtctc

SEQ ID NO: 496 - DNA, 1719 bp, Homo sapiens
caaacacatacaggaagcgatcaaacctaccaaggcagtctcacttctcaatgactggactgtgtgggtactctgctccagacatgcgtggcctcagactcatcatgataccagttgagctgctactttgctacctcctgctgcaccctgtggatgccacttcatatggaaagcagacaaatgtcttgatgcactttcccttgtccttggaatcccagacaccctcctcagaccccttgtcctgccaatttctgcacccaaagtcactgcctggtttcagccacatggcccctctacccaagttcttggtaagcctggctctaaggaatgccctggaggaagctggttgtcaggctgatgtttgggctctacagctacagctctaccgccagggtggtgtgaatgctacacaggtcctcatccagcatcttcgagggctccagaaaggcagaagcacagagaggaacgtgtcagtggaagccctggcctctgctctgcagctgttagccagggagcagcaaagcacaggaagggtcgggcgctccctcccgacagaggactgtgagaatgagaaggagcaagctgtgcacaatgtagtccagctgctgccaggagtgggaaccttctacaacctgggcacagctttgtattatgctactcaaaactgcctgggcaaggccagggaacgaggccgagatggggccatagatctgggatatgaccttctgatgaccatggctgggatgtcaggggggcctatgggtctagcgatcagtgctgcacttaaacctgcattaaggtctggggttcagcagttgatccagtattaccaagatcagaaagacgcaaacatctctcagccggagaccaccaaggagggtttgagggccatctcagatgtgagtgacttggaagaaacaactactctggcttctttcatatcagaagtagtaagttcagctccctactgggggtgggccataatcaagagctatgacttagatcctggggctgggagtcttgagatataaaagaatgtggtaaccacagaattaataactgtctaccctgacaagctatatacatgtcttcaaaattttaatctgatttatccaggaggaaggctgtacagtaaaacgtaagaacgtaaatgtttgggtgttgaagtcacagggtttggtttcgaatctaggctccacttgttagagcctcggtgatcactgaatagtaacttctttcttgaactaagatcagttttgaagtttctaaaggagatagaatgattttaacctcaatgagttgccctgtaaatttaaaatgatacaatgaatctaaaatgcttatcacagtactttcaataaatagctattagccaggtgcggtggctcacgcctgtaatcccagcactgtgagaggctgaggcgggatgatcacctgaggtcaggagttcaagatcagcctgcgcaacatggcgaaaccccgtctctacaataaatagcaaaaaattatcctggcggagttatgcacgcttgtagtcccaactacctgggaggctgaggcgggagaatcacctgagcctgggaggctgaggcgggagaatcacctgagcctgggaggtcgaggctgcagcgagccgagatcgcgccgctgcattccagcctgggtgacagagcgagaccatgtctcaaaaaataaaaataaaaaaaaattgttttcatt

SEQ ID NO: 497 - DNA, 60 bp, Homo sapiens
aaatgtttgggtgttgaagtcacagggtttggtttcgaatctaggctccacttgttagag

SEQ ID NO: 498 - DNA, 1906 bp, Homo sapiens
agtctctggattaggcaggcagaggcagttatgggcttctgcagtggcgagaaaggaagcgcctgaagggtcgtgaggctggggcgggacccggcaccgctggggcggccaggccgtgaggacttcaatggcgagcagcgtggacgaggaggcgctgcaccagctgtacctgtgggtagacaacatccctctgtcccggcccaagcgaaacctctcccgggactttagcgatggagtccttgttgcagaggtcatcaagttttacttccccaagatggtggagatgcacaattatgtccccgccaactctctccagcagaagctcagcaactggggtcatctgaacaggaaggtactgaagaggctgaacttttcagtaccggatgacgtgatgcgcaagatcgcgcagtgcgccccaggcgtggtggagctggtgctcatcccgctgaggcagcgcctggaggagaggcagaggcgcaggaagcagggcgccggctccttacaggagctggctccccaggatggcagtggctacatggatgtgggtaaggtggccttttccatttctccctcccggttggagctttccttctgtccttcttcctgtcacttgtaagagtggaagtagggagggggaagcaggagaatgagactccagcacagtcattcctccacttgccttgtctcaggtgtatcccagaaggcccgaggtgaaggtgtcccggacccccagggagggggtcagctcaggtaaagaagctgggagttccagacttcaccaggctggtgatctctgcacacagctggggttggggggcacggtacgctgagcctgagacgggaggcaggaaaggggctagagggggagaagggaaggcctggtcgagggccctggaagggtgagtgtagggcccgaggtccaagcctccgctaagctgcttctcaccccagctgggaccggccaccggcgcctcagcctccagcgtataaccgggcgttgcagggcgaccccagcttcgtcctccagatcgctgaaaaggagcaggagctgttggcctctcaagagaccgtgcaggtcctgcagatgaaggtaaggcgcctggagcacctgctccagctcaagaatgtgcggatcgaagacctctcccggcggctccagcaggcggagcgtaagcagcggtgagcggcggcccgggccgcgcggggacgcccgggtacccgccagagccccgacgccgcgccggacccacccaccgatggatagaccattgggagggcggagcccgctgctctcacgagcctgctggggcccgagtgccctccttccttgggatgggtgagcgtgggaggagatgggacaggaactctaggagcgcaggcccgggactgagccgcctcctaccactccggagatccgggtcaggagaatggaccgctttccagagcccagaagccacgtgcagagacctagcctgtcccccaaagcagtgtccaacaccttgggcccggccttgcatctcccggcgctgggccttggggggcggtcccttggctctgtccacacccccagaatcaggtccccgcccagctccgaggacggcggcgtctccatccacgctagttccccatgccctcagccatgggggaatctgtcccgggccgctgaggggctcccctgcccctcctgggagcttacctgggacccacctcggcgacggagaccgcagcagctggagaggaaggggtgaggcgtgggatcgccaggagtagggaggacatcgacgatgtgcccgtagcagtcacccctccctcctcgcgcacggggtactgaggcggaaggtttgaaggttacggctcagggctgccccattaaagtcagtgttgtgttctaaaaaaaaaaaaaaaa

SEQ ID NO: 499 - DNA, 60 bp, Homo sapiens
aaggtttgaaggttacggctcagggctgccccattaaagtcagtgttgtgttctaaaaaa

SEQ ID NO: 500 - DNA, 2020 bp, Homo sapiens
gcaactaatcagtgtcctctaaatactttagcaagcccactaaagataactatattccttttgcatgtgcttgggtgatcagtttttatacaggttgcaaaacatagtattcattaaagacatgaatttagaattgatttctttgagtggtatttctcttgattgagcagctagacaaaataatctgcaaatttaaatgtggcgcatttgactcattcttgagaaattctcataagtgaagaggattagcccttaaggttttaatacctggtacagtagtgaaccgcacagatttcatgaacttaggatgtgttttttattcatgaaaaacttagaatagtgaactattaatatttaaaaacgagaaatacaacatttaaaaaattaagagtattttgcattagtgattatgattcttatcccaaaattctagaaagtaataaattctgtatgaataagcataaaaaataaataaatatgcaataacattaaattaaatgtctttacaagaagcagtgaaggcactggtcttaagtgagaatatttgcctgggagtagagataaagacacaaaccgaatgtgaaataccaggtaataattattttgcattaaactctttttatcgggaatagtatgatattttcaatgtcactccattcatgttgatttggagctgacagttattttgtgtaagcagagatttaattttatattgaaagtcagtgcaaaattatgaataggatatactaataaatacaaagtaataacaaaagtcaaagcagtgttctaaataaaaattctgggttccttaaaaattattttaaatttatctttgaaatagttttcttagattaatctcaggatatgagaaagtcaattaagtgtgagtaaagttagtatcattaaacaaattgtctattaaatgcaagacgtggtaatatacagaatttatcaggcattaccaagtctaggcacatataggaaatgcagcactcagaatggtttcaatgtagtagttgatgcttgtaaggtaggggagcttattcagacatagtagatagtttctctaatgctgtctcaattgctggcctttggctacctgtacttccccattatggcagcccattcagtcttgagttttcttctctggacatcttatgctctgaaatcatgagcgaggctgattcaattggtgatttgggtagaaagcagtatgttttgctgacattaagatgtaggttatagataggtttagcctttaagtgtatgtttttatactttaaaataagaaatataaccttttaagctattccacctcctcccccagcctatctcaaactggtggaatatatggagagatcttgaaagaggtaaaataaaccttcactgctccactccaggtgaatccgcccactcccactgacctagtagaatttgtaatttaatacttaccttctatttctgaaatcagttgtgaactgttgccttatgttcagaggtttaagaacctcagtgaattcattttttaaaatctgctattctgagaagcattgaatgaattcttaacaagaagactcatctgtagctgtttgctgactcctatgagcccataagggttctgtgcttagcattaacaaaataaggtttataggtaaagccaatgtattaatttttttttgcatggagggctttaaaatttgtgctctttttcatattttattcatattcaatttatggtttgtaactgctttttagggagataattatatgttataaattagttttggggggaataattgtgcaaagaggataatttaatttacgtgcttctgttattcagaataaagagagaagactacgctgcatattcaagagttgtaccttaacattggtgaaacattttttctaagattttcaaaaggaatatgtgtaaattgagaaatcataaccactgtcctaacttggtaaacaaactgttcttaaataaagtatttaatgattttaaaaaaaaaaaaaaaaa

SEQ ID NO: 501 - DNA, 60 bp, Homo sapiens
aaatctgctattctgagaagcattgaatgaattcttaacaagaagactcatctgtagctg

SEQ ID NO: 502 - DNA, 2081 bp, Homo sapiens
tcgggaagccatagggcgcctcccagcccgtctccccgctccagtttagaacctaattcccaattcccggaccgggcccagccctgggctcttactgtccgcttttgctgggacctgttccacaaatgggcgtcttctgccttgggccgtgggggttgggccggaagctgcggacgcctgggaaggggccgctgcagctcttgagccgcctctgcggggaccacttgcaggccatcccagccaagaaggccccggctgggcaggaggagcctgggacgccgccctcctcgccgctgagtgccgagcagttggaccggatccagaggaacaaggccgcggccctgctcagactcgcggcccgcaacgtgcccgtgggctttggagagagctggaagaagcacctcagcggggagttcgggaaaccgtattttatcaagctaatgggatttgttgcagaagaaagaaagcattacactgtttatccacccccacaccaagtcttcacctggacccagatgtgtgacataaaagatgtgaaggttgtcatcctgggacaggatccatatcatggacctaatcaagctcacgggctctgctttagtgttcaaaggcctgttccgcctccgcccagtttggagaacatttataaagagttgtctacagacatagaggattttgttcatcctggccatggagatttatctgggtgggccaagcaaggtgttctccttctcaacgctgtcctcacggttcgtgcccatcaagccaactctcataaggagcgaggctgggagcagttcactgatgcagttgtgtcctggctaaatcagaactcgaatggccttgttttcttgctctggggctcttatgctcagaagaagggcagtgccattgataggaagcggcaccatgtactacagacggctcatccctcccctttgtcagtgtatagagggttctttggatgtagacacttttcaaagaccaatgagctgctgcagaagtctggcaagaagcccattgactggaaggagctgtgatcatcagctgaggggtggcctttgagaagctgctgttaacgtatttgccagttacgaagttccactgaaaattttcctattaattcttaagtactctgcataagggggaaaagcttccagaaagcagccatgaaccaggctgtccaggaatggcagctgtatccaaccacaaacaacaaaggctaccctttgaccaaatgtctttctctgcaacatggcttcggcctaaaatatgcagaagacagatgaggtcaaatactcagttggctctctttatctcccttgcctttatggtgaaacaggggagatgtgcacctttcaggcacagccctagtttggcgcctgctgctccttggttttgcctggttagactttcagtgacagatgttggggtgtttttgcttagaaaggtccccttgtctcagccttgcagggcaggcatgccagtctctgccagttccactgcccccttgatctttgaaggagtcctcaggcccctcgcagcataaggatgttttgcaactttccagaatctggcccagaaattagggctcaatttcctgattgtagtagaggttaagattgctgtgagctttatcagataagagaccgagagaagtaagctgggtcttgttattccttgggtgttggtggaataagcagtggaatttgaacaaggaagaggagaaaagggaattttgtctttatggggtggggtgattttctcctagggttatgtccagttggggtttttaaggcagcacagactgccaagtactgttttttttaaccgactgaaatcactttgggatattttttcctgcaacactggaaagttttagttttttaagaagtactcatgcagatatatatatatatatttttcccagtcctttttttaagagacggtctttattgggtctgcacctccatccttgatcttgttagcaatgctgtttttgctgttagtcgggttagagttggctctacgcgaggtttgttaataaaagtttgttaaaagtttaaaaaaaaaaaaaaaaa

SEQ ID NO: 503 - DNA, 60 bp, Homo sapiens
gtgagctttatcagataagagaccgagagaagtaagctgggtcttgttattccttgggtg

SEQ ID NO: 504 - DNA, 1549 bp, Homo sapiens
tggcagtgcgcctgcgccgcgtcggcgtgcggaacgccgcggtgtctcggcgcctctgcgcgcgggaagatggcggaacaggctaccaagtccgtgctgtttgtgtgtctgggtaacatttgtcgatcacccattgcagaagcagttttcaggaaacttgtaaccgatcaaaacatctcagagaattggagggtagacagcgcggcaacttccgggtatgagatagggaacccccctgactaccgagggcagagctgcatgaagaggcacggcattcccatgagccacgttgcccggcagattaccaaagaagattttgccacatttgattatatactatgtatggatgaaagcaatctgagagatttgaatagaaaaagtaatcaagttaaaacctgcaaagctaaaattgaactacttgggagctatgatccacaaaaacaacttattattgaagatccctattatgggaatgactctgactttgagacggtgtaccagcagtgtgtcaggtgctgcagagcgttcttggagaaggcccactgaggcaggttcgtgccctgctgcggccagcctgactagaccccaccctgaggtcctgcatttctcagtcggtgtgtaatcacgttccagggcccaaagcccagctctttgttcagttgacttactgtttcttaccttaaaaagtaattgtagatggaaatcagttgtgtttggcaggagaatcaataaaaatctttgattcagacagcttatggggtattttaagcattcttagactagttgaacatctcactttgccccagttacaaaaatagtagaacaagcaacataaaacaatgaaggaaaacctcacttgaaggcccaggtcaacatctaagcctgttgagacttagataatcgagtctacctcttcagtaggtttgtgtggatggcctggagggcaggtgccctctgctccccagtgctacctctctcttccctagggccttttgtggattgacagtagtcccctccgtaggagctcacagtctagattagaagtgttttaatttctacacacccatagtgcacacttgtatattgaaaagatagggaagagagaaacatttatggaatcagtcgttggcaccttcaatacttcatgatttttgtcgagtttacttcatgaggaggtcagcccattggctcccatctgaaccactttgcctctgaaacttaattacatccagaaagaaggacacttgtatgctagtctatggtcagttgaggaatatgactgtttttatatgcacatgtaacccaaatgtccaatataaattggcttattttttaaaataattttaaaagttgggaaaagtgttattatttggcatgcttaaatattgaataagtattcttcatcagcatttaataaatgtataggcagatgtaaggtaatttctgtgtattttgagataatgtcaaaatcatgaatatttcaaaataaactggggagttataaaaatacaactagagatataaaaaaaaaaaaaaaaaaaaaaaaaaa

SEQ ID NO: 505 - DNA, 60 bp, Homo sapiens
gaagtgttttaatttctacacacccatagtgcacacttgtatattgaaaagatagggaag

SEQ ID NO: 506 - DNA, 2062 bp, Homo sapiens
ccctccattgctatggataccgaatccacttattctggatattcttactattcaagtcattcgaaaaaatctcacagacaaggggaaagaactagagagagacacaagtcaccccggaataaagacggcagagggtcagaaaagtctgtcaccattcaacctcccactggagagcccctgttgggaaatgattctactcggacagaggaagttcaggatgacaactggggagagaccaccacggccatcacaggcacctcggagcacagcatatcccaagaggacattgccaggatcagcaaggacatggaggacagcgtggggctggattgcaaacgctacctgggcctcaccgtcgcctcttttcttggacttctagttttcctcacccctattgccttcatccttttacctccgatcctgtggagggatgagctggagccttgtggcacaatttgtgaggggctctttatctccatggcattcaaactcctcattctgctcatagggacctgggcactttttttccgcaagcggagagctgacatgccacgggtgtttgtgtttcgtgcccttttgttggtcctcatctttctctttgtggtttcctattggcttttttacggggtccgcattttggactctcgggaccggaattaccagggcattgtgcaatatgcagtctcccttgtggatgccctcctcttcatccattacctggccatcgtcctgctggagctcaggcagctgcagcccatgttcacgctgcaggtggtccgctccaccgatggcgagtcccgcttctacagcctgggacacctgagtatccagcgagcagcattggtggtcctagaaaattactacaaagatttcaccatctataacccaaacctcctaacagcctccaaattccgagcagccaagcatatggccgggctgaaagtctacaatgtagatggccccagtaacaatgccactggccagtcccgggccatgattgctgcagctgctcggcgcagggactcaagccacaacgagttgtattatgaagaggccgaacatgaacggcgagtaaagaagcggaaagcaaggctggtggttgcagtggaagaggccttcatccacattcagcgtctccaggctgaggagcagcagaaagccccaggggaggtgatggaccctagggaggccgcccaggccattttcccctccatggccagggctctccagaagtacctgcgcatcacccggcagcagaactaccacagcatggagagcatcctgcagcacctggccttctgcatcaccaacggcatgacccccaaggccttcctagaacggtacctcagtgcgggccccaccctgcaatatgacaaggaccgctggctctctacacagtggaggcttgtcagtgatgaggctgtgactaatggattacgggatggaattgtgttcgtccttaagtgcttggacttcagcctcgtagtcaatgtgaagaaaattccattcatcatactctctgaagagttcatagaccccaaatctcacaaatttgtccttcgcttacagtctgagacatccgtttaaaagttctatatttgtggctttattaaaaaaaaaagaaaaatatatagagagatatatatctatgccagaggggtgtcttttttaaaaattcttcttcattgctgactgaaactggcagatgattgaccagtatcctttgaccatctgcactttatttggaaggaagcaggggctgtccaccctgaaaaagagtgactgatgacatctgacttttgtcgatgggacttctcaagaagccattccttggagcttctgttacagctgtaaaccaaagtggagctggtgcttcttgggagcctcgccttacaactaattcctgcctttcgtccagtaccaagtcccccgttgcttctggtcagcccacttgtagacttccaggggacacatctttattctgtttcaggaaaccagtcacgacacgtccacatatgtatttgtgtatgttaatgtccagtatcacatcacccatgaaagt

SEQ ID NO: 507 - DNA, 60 bp, Homo sapiens
aacaaacaaacaaaggtcaagctctaagaaaattactgctcaaacttcactaccctggaa

SEQ ID NO: 508 - DNA, 3043 bp, Homo sapiens
cgagttggaagaggtgagtcctgtctcaaaatggaggtaaaaccgccgcctggttgcccccagcccgactccggcagtcgccgtcgccgctggggggaggagggccatgatccaaaggaaccagagcagctgagaaaactgtttattggtggtctgagctttgaaactacagatgatagtttaagagaacattttgagaaatggggcacactcacagattgtctggtaatgagagacccccaaacaaaacgttccaggggctttggttttgtgacttattcttgtgttacagaggtggatgcagcaatcggtgctcgaccattcaaggttgatgggcgtgtagtggaaccaaagagagctgtttctagagaggattctgtgaagcctggtgcccatctaacagtgaagaaaatttttgttggcagtattaaagaagatacagaagaatataatttgagagactactttgaaaagtacggcaagattgaaaccatagaagttatggaagacaggcagagtggaaaaaagagaggatttgcttctgtaacttttgatgatcatgatacagttgataaaattgttgttcagaaataccacactattaatgggcataactgtgaagtgaaaaaggcccttgctaaacaagtgatgcagccggctggatcacagaggggtcgtggaggtggatctggcaattgtatgggtcacagaggaaactttggaggtggtggaggtaattttggccgtgatggaaactttggtggaagaggaggctatggtggtggaggtggtggcagcagaggtagttatggaggaggtgatgtggatataatggattaggaggtgatggtggcaactatggcagtggtcctggttatagtagtagaggcgggtatggtggtggtggaccaggatatggaaaccaaggtggtggatatggtggcggtgttggaggatatgatggttacaatgaaggaggaaattttgacggtagtaactatggtggtggtgggaactataatgattttggaaattacagtggacaacagcaatcaaattatggacacatgaaagggggcagttttggtggaagaagctcgggcagtccctatggtggtggttatggatctggtggtggaagtggtggatatggtagcagaaggttctaaaaacagcaggaaaagggctacagttcttagcaggagagagagtgaggagttgtcaggaaagctgcaggttactttgagacagtcgtcccaagtgcattagaggaactgtaaaaatctgtcacagaaggaacgatgatccataatcagaaaagttactgcagcttaaacaggaaacccttcttgttcaggactgtcatagccacagtttgcaaaaagtgcagctattgattaatgcaatgtagtgtcaattagatgtacattcctgaggttcttttatctgttgtagctttgtctttttctttttcttttcattacatcaggtatattgccctgtaaattgtggtagtggtaccaggaataaaaaattaaggaatttttaacttttcaatatttgtgtagttcagtttttctacattttagtacagaaactttaacaaaatgcagtttcgaaggtgtttccttgtgagttaacaagtaaagaagatcattgttaattactattttgtatgaattttgctaaagttaactgtaaagaaacacctgctgacttgcagtttaaggggaatctattctccccatttccaaaccatgatatgaatgggcgctgacatgtggagagaatagataatttgtgtgtttgcaatgtgtgttttagataaataggattgggtatttaaattagcatttgtgaatttaatagcattaagattaccttcaaatgaaaaaaaatctcaaaatttctatttggtttttgtgcattttcttttaaaatgtaatcatatgattttagtgtgttagacttgctgagtcctagctgtgtttagaacagaacatctctattctacatttaccttggtcaaatttgaactgctgccataggttttgggtgtaaagaatgtttactgccctccatttaaattctgaaaagggatggtggatgttttccctctcctacgttagaaaccattcttaaaaacttttgaaaatatagaaccattaagcctgctatatctgagcaaattagtgggtaaccttttttccttttttaaagcacaagaggcccataaatcttgagttatttgcattagtttacattttttgatacaacttttcagaccaagagaataaaaatcatgcgttattaaacccctagctggctggcatgctttcctgtttgtactgtatacattttgctggatgaaaccaagatagtttaggtataattgtccaaaataacctaactgcagcagaaatgtaggacagttgcttagtacaggcttctcacttcctacagacctgaattcaaatttggatagtctgagttattaaattcccaaagacaaagaacacactcttatttcttgtgtatatttcaacataaatcatgttgttaccaatttgttgggaaggccctggttgagaagagttttagataataaggctgtatatatatagatatatatagatatataccaatgtctatatatagagatattttatatatatatatacaggtatatatatgtgtgtgtatatatatatatgtatatacatatatacatatatatatatatatggatatatacatatatatatatatatggatatatacccatgtctactgttttgcttcagctagtgcttacaatttcattcaagtcctgagtatgtgtcctgctgttactccttctttggtagttgaaagttgaattcaagtctttccttctgttttaagaagtactaagcaaacaagcaataaaaaggggaatggcgcatgctagtgtttgaatatgctctcttgttgctctaattctgtgcctccgtgcattaatatttggatgcatgcaatgccacatggaaattggcctcatggc

SEQ ID NO: 509 - DNA, 60 bp, Homo sapiens
cacttcctacagacctgaattcaaatttggatagtctgagttattaaattcccaaagaca

SEQ ID NO: 510 - DNA, 12515 bp, Homo sapiens
ctaccgggcggaggtgagcgcggcgccggctcctcctgcggcggactttgggtgcgacttgacgagcggtggttcgacaagtggccttgcgggccggatcgtcccagtggaagagttgtaaatttgcttctggccttcccctacggattatacctggccttcccctacggattatactcaacttactgtttagaaaatgtggcccacgagacgcctggttactatcaaaaggagcggggtcgacggtccccactttcccctgagcctcagcacctgcttgtttggaaggggtattgaatgtgacatccgtatccagcttcctgttgtgtcaaaacaacattgcaaaattgaaatccatgagcaggaggcaatattacataatttcagttccacaaatccaacacaagtaaatgggtctgttattgatgagcctgtacggctaaaacatggagatgtaataactattattgatcgttccttcaggtatgaaaatgaaagtcttcagaatggaaggaagtcaactgaatttccaagaaaaatacgtgaacaggagccagcacgtcgtgtctcaagatctagcttctcttctgaccctgatgagaaagctcaagattccaaggcctattcaaaaatcactgaaggaaaagtttcaggaaatcctcaggtacatatcaagaatgtcaaagaagacagtaccgcagatgactcaaaagacagtgttgctcagggaacaactaatgttcattcctcagaacatgctggacgtaatggcagaaatgcagctgatcccatttctggggattttaaagaaatttccagcgttaaattagtgagccgttatggagaattgaagtctgttcccactacacaatgtcttgacaatagcaaaaaaaatgaatctcccttttggaagctttatgagtcagtgaagaaagagttggatgtaaaatcacaaaaagaaaatgtcctacagtattgtagaaaatctggattacaaactgattacgcaacagagaaagaaagtgctgatggtttacagggggagacccaactgttggtctcgcgtaagtcaagaccaaaatctggtgggagcggccacgctgtggcagagcctgcttcacctgaacaagagcttgaccagaacaaggggaagggaagagacgtggagtctgttcagactcccagcaaggctgtgggcgccagctttcctctctatgagccggctaaaatgaagacccctgtacaatattcacagcaacaaaattctccacaaaaacataagaacaaagacctgtatactactggtagaagagaatctgtgaatctgggtaaaagtgaaggcttcaaggctggtgataaaactcttactcccaggaagctttcaactagaaatcgaacaccagctaaagttgaagatgcagctgactctgccactaagccagaaaatctctcttccaaaaccagaggaagtattcctacagatgtggaagttctgcctacggaaactgaaattcacaatgagccatttttaactctgtggctcactcaagttgagaggaagatccaaaaggattccctcagcaagcctgagaaattgggcactacagctggacagatgtgctctgggttacctggtcttagttcagttgatatcaacaactttggtgattccattaatgagagtgagggaatacctttgaaaagaaggcgtgtgtcctttggtgggcacctaagacctgaactatttgatgaaaacttgcctcctaatacgcctctcaaaaggggagaagccccaaccaaaagaaagtctctggtaatgcacactccacctgtcctgaagaaaatcatcaaggaacagcctcaaccatcaggaaaacaagagtcaggttcagaaatccatgtggaagtgaaggcacaaagcttggttataagccctccagctcctagtcctaggaaaactccagttgccagtgatcaacgccgtaggtcctgcaaaacagcccctgcttccagcagcaaatctcagacagaggttcctaagagaggaggagaaagagtggcaacctgccttcaaaagagagtgtctatcagccgaagtcaacatgatattttacagatgatatgttccaaaagaagaagtggtgcttcggaagcaaatctgattgttgcaaaatcatgggcagatgtagtaaaacttggtgcaaaacaaacacaaactaaagtcataaaacatggtcctcaaaggtcaatgaacaaaaggcaaagaagacctgctactccaaagaagcctgtgggcgaagttcacagtcaatttagtacaggccacgcaaactctccttgtaccataataatagggaaagctcatactgaaaaagtacatgtgcctgctcgaccctacagagtgctcaacaacttcatttccaaccaaaaaatggactttaaggaagatctttcaggaatagctgaaatgttcaagaccccagtgaaggagcaaccgcagttgacaagcacatgtcacatcgctatttcaaattcagagaatttgcttggaaaacagtttcaaggaactgattcaggagaagaacctctgctccccacctcagagagttttggaggaaatgtgttcttcagtgcacagaatgcagcaaaacagccatctgataaatgctctgcaagccctcccttaagacggcagtgtattagagaaaatggaaacgtagcaaaaacgcccaggaacacctacaaaatgacttctctggagacaaaaacttcagatactgagacagagccttcaaaaacagtatccactgtaaacaggtcaggaaggtctacagagttcaggaatatacagaagctacctgtggaaagtaagagtgaagaaacaaatacagaaattgttgagtgcatcctaaaaagaggtcagaaggcaacactactacaacaaaggagagaaggagagatgaaggaaatagaaagaccttttgagacatataaggaaaatattgaattaaaagaaaacgatgaaaagatgaaagcaatgaagagatcaagaacttgggggcagaaatgtgcaccaatgtctgacctgacagacctcaagagcttgcctgatacagaactcatgaaagacacggcacgtggccagaatctcctccaaacccaagatcatgccaaggcaccaaagagtgagaaaggcaaaatcactaaaatgccctgccagtcattacaaccagaaccaataaacaccccaacacacacaaaacaacagttgaaggcatccctggggaaagtaggtgtgaaagaagagctcctagcagtcggcaagttcacacggacgtcaggggagaccacgcacacgcacagagagccagcaggagatggcaagagcatcagaacgtttaaggagtctccaaagcagatcctggacccagcagcccgtgtaactggaatgaagaagtggccaagaacgcctaaggaagaggcccagtcactagaagacctggctggcttcaaagagctcttccagacaccaggtccctctgaggaatcaatgactgatgagaaaactaccaaaatagcctgcaaatctccaccaccagaatcagtggacactccaacaagcacaaagcaatggcctaagagaagtctcaggaaagcagatgtagaggaagaattcttagcactcaggaaactaacaccatcagcagggaaagccatgcttacgcccaaaccagcaggaggtgatgagaaagacattaaagcatttatgggaactccagtgcagaaactggacctggcaggaactttacctggcagcaaaagacagctacagactcctaaggaaaaggcccaggctctagaagacctggctggctttaaagagctcttccagactcctggtcacaccgaggaattagtggctgctggtaaaaccactaaaataccctgcgactctccacagtcagacccagtggacaccccaacaagcacaaagcaacgacccaagagaagtatcaggaaagcagatgtagagggagaactcttagcgtgcaggaatctaatgccatcagcaggcaaagccatgcacacgcctaaaccatcagtaggtgaagagaaagacatcatcatatttgtgggaactccagtgcagaaactggacctgacagagaacttaaccggcagcaagagacggccacaaactcctaaggaagaggcccaggctctggaagacctgactggctttaaagagctcttccagacccctggtcatactgaagaagcagtggctgctggcaaaactactaaaatgccctgcgaatcttctccaccagaatcagcagacaccccaacaagcacaagaaggcagcccaagacacctttggagaaaagggacgtacagaaggagctctcagccctgaagaagctcacacagacatcaggggaaaccacacacacagataaagtaccaggaggtgaggataaaagcatcaacgcgtttagggaaactgcaaaacagaaactggacccagcagcaagtgtaactggtagcaagaggcacccaaaaactaaggaaaaggcccaacccctagaagacctggctggctggaaagagctcttccagacaccagtatgcactgacaagcccacgactcacgagaaaactaccaaaatagcctgcagatcacaaccagacccagtggacacaccaacaagctccaagccacagtccaagagaagtctcaggaaagtggacgtagaagaagaattcttcgcactcaggaaacgaacaccatcagcaggcaaagccatgcacacacccaaaccagcagtaagtggtgagaaaaacatctacgcatttatgggaactccagtgcagaaactggacctgacagagaacttaactggcagcaagagacggctacaaactcctaaggaaaaggcccaggctctagaagacctggctggctttaaagagctcttccagacacgaggtcacactgaggaatcaatgactaacgataaaactgccaaagtagcctgcaaatcttcacaaccagacctagacaaaaacccagcaagctccaagcgacggctcaagacatccctggggaaagtgggcgtgaaagaagagctcctagcagttggcaagctcacacagacatcaggagagactacacacacacacacagagccaacaggagatggtaagagcatgaaagcatttatggagtctccaaagcagatcttagactcagcagcaagtctaactggcagcaagaggcagctgagaactcctaagggaaagtctgaagtccctgaagacctggccggcttcatcgagctcttccagacaccaagtcacactaaggaatcaatgactaatgaaaaaactaccaaagtatcctacagagcttcacagccagacctagtggacaccccaacaagctccaagccacagcccaagagaagtctcaggaaagcagacactgaagaagaatttttagcatttaggaaacaaacgccatcagcaggcaaagccatgcacacacccaaaccagcagtaggtgaagagaaagacatcaacacgtttttgggaactccagtgcagaaactggaccagccaggaaatttacctggcagcaatagacggctacaaactcgtaaggaaaaggcccaggctctagaagaactgactggcttcagagagcttttccagacaccatgcactgataaccccacagctgatgagaaaactaccaaaaaaatactctgcaaatctccgcaatcagacccagcggacaccccaacaaacacaaagcaacggcccaagagaagcctcaagaaagcagacgtagaggaagaatttttagcattcaggaaactaacaccatcagcaggcaaagccatgcacacgcctaaagcagcagtaggtgaagagaaagacatcaacacatttgtggggactccagtggagaaactggacctgctaggaaatttacctggcagcaagagacggccacaaactcctaaagaaaaggccaaggctctagaagatctggctggcttcaaagagctcttccagacaccaggtcacactgaggaatcaatgaccgatgacaaaatcacagaagtatcctgcaaatctccacaaccagacccagtcaaaaccccaacaagctccaagcaacgactcaagatatccttggggaaagtaggtgtgaaagaagaggtcctaccagtcggcaagctcacacagacgtcagggaagaccacacagacacacagagagacagcaggagatggaaagagcatcaaagcgtttaaggaatctgcaaagcagatgctggacccagcaaactatggaactgggatggagaggtggccaagaacacctaaggaagaggcccaatcactagaagacctggccggcttcaaagagctcttccagacaccagaccacactgaggaatcaacaactgatgacaaaactaccaaaatagcctgcaaatctccaccaccagaatcaatggacactccaacaagcacaaggaggcggcccaaaacacctttggggaaaagggatatagtggaagagctctcagccctgaagcagctcacacagaccacacacacagacaaagtaccaggagatgaggataaaggcatcaacgtgttcagggaaactgcaaaacagaaactggacccagcagcaagtgtaactggtagcaagaggcagccaagaactcctaagggaaaagcccaacccctagaagacttggctggcttgaaagagctcttccagacaccagtatgcactgacaagcccacgactcacgagaaaactaccaaaatagcctgcagatctccacaaccagacccagtgggtaccccaacaatcttcaagccacagtccaagagaagtctcaggaaagcagacgtagaggaagaatccttagcactcaggaaacgaacaccatcagtagggaaagctatggacacacccaaaccagcaggaggtgatgagaaagacatgaaagcatttatgggaactccagtgcagaaattggacctgccaggaaatttacctggcagcaaaagatggccacaaactcctaaggaaaaggcccaggctctagaagacctggctggcttcaaagagctcttccagacaccaggcactgacaagcccacgactgatgagaaaactaccaaaatagcctgcaaatctccacaaccagacccagtggacaccccagcaagcacaaagcaacggcccaagagaaacctcaggaaagcagacgtagaggaagaatttttagcactcaggaaacgaacaccatcagcaggcaaagccatggacaccccaaaaccagcagtaagtgatgagaaaaatatcaacacatttgtggaaactccagtgcagaaactggacctgctaggaaatttacctggcagcaagagacagccacagactcctaaggaaaaggctgaggctctagaggacctggttggcttcaaagaactcttccagacaccaggtcacactgaggaatcaatgactgatgacaaaatcacagaagtatcctgtaaatctccacagccagagtcattcaaaacctcaagaagctccaagcaaaggctcaagatacccctggtgaaagtggacatgaaagaagagcccctagcagtcagcaagctcacacggacatcaggggagactacgcaaacacacacagagccaacaggagatagtaagagcatcaaagcgtttaaggagtctccaaagcagatcctggacccagcagcaagtgtaactggtagcaggaggcagctgagaactcgtaaggaaaaggcccgtgctctagaagacctggttgacttcaaagagctcttctcagcaccaggtcacactgaagagtcaatgactattgacaaaaacacaaaaattccctgcaaatctcccccaccagaactaacagacactgccacgagcacaaagagatgccccaagacacgtcccaggaaagaagtaaaagaggagctctcagcagttgagaggctcacgcaaacatcagggcaaagcacacacacacacaaagaaccagcaagcggtgatgagggcatcaaagtattgaagcaacgtgcaaagaagaaaccaaacccagtagaagaggaacccagcaggagaaggccaagagcacctaaggaaaaggcccaacccctggaagacctggccggcttcacagagctctctgaaacatcaggtcacactcaggaatcactgactgctggcaaagccactaaaataccctgcgaatctcccccactagaagtggtagacaccacagcaagcacaaagaggcatctcaggacacgtgtgcagaaggtacaagtaaaagaagagccttcagcagtcaagttcacacaaacatcaggggaaaccacggatgcagacaaagaaccagcaggtgaagataaaggcatcaaagcattgaaggaatctgcaaaacagacaccggctccagcagcaagtgtaactggcagcaggagacggccaagagcacccagggaaagtgcccaagccatagaagacctagctggcttcaaagacccagcagcaggtcacactgaagaatcaatgactgatgacaaaaccactaaaataccctgcaaatcatcaccagaactagaagacaccgcaacaagctcaaagagacggcccaggacacgtgcccagaaagtagaagtgaaggaggagctgttagcagttggcaagctcacacaaacctcaggggagaccacgcacaccgacaaagagccggtaggtgagggcaaaggcacgaaagcatttaagcaacctgcaaagcggaacgtggacgcagaagatgtaattggcagcaggagacagccaagagcacctaaggaaaaggcccaacccctggaagacctggccagcttccaagagctctctcaaacaccaggccacactgaggaactggcaaatggtgctgctgatagctttacaagcgctccaaagcaaacacctgacagtggaaaacctctaaaaatatccagaagagttcttcgggcccctaaagtagaacccgtgggagacgtggtaagcaccagagaccctgtaaaatcacaaagcaaaagcaacacttccctgcccccactgcccttcaagaggggaggtggcaaagatggaagcgtcacgggaaccaagaggctgcgctgcatgccagcaccagaggaaattgtggaggagctgccagccagcaagaagcagagggttgctcccagggcaagaggcaaatcatccgaacccgtggtcatcatgaagagaagtttgaggacttctgcaaaaagaattgaacctgcggaagagctgaacagcaacgacatgaaaaccaacaaagaggaacacaaattacaagactcggtccctgaaaataagggaatatccctgcgctccagacgccaagataagactgaggcagaacagcaaataactgaggtctttgtattagcagaaagaatagaaataaacagaaatgaaaagaagcccatgaagacctccccagagatggacattcagaatccagatgatggagcccggaaacccatacctagagacaaagtcactgagaacaaaaggtgcttgaggtctgctagacagaatgagagctcccagcctaaggtggcagaggagagcggagggcagaagagtgcgaaggttctcatgcagaatcagaaagggaaaggagaagcaggaaattcagactccatgtgcctgagatcaagaaagacaaaaagccagcctgcagcaagcactttggagagcaaatctgtgcagagagtaacgcggagtgtcaagaggtgtgcagaaaatccaaagaaggctgaggacaatgtgtgtgtcaagaaaataacaaccagaagtcatagggacagtgaagatatttgacagaaaaatcgaactgggaaaaatataataaagttagttttgtgataagttctagtgcagtttttgtcataaattacaagtgaattctgtaagtaaggctgtcagtctgcttaagggaagaaaactttggatttgctgggtctgaatcggcttcataaactccactgggagcactgctgggctcctggactgagaatagttgaacaccgggggctttgtgaaggagtctgggccaaggtttgccctcagctttgcagaatgaagccttgaggtctgtcaccacccacagccaccctacagcagccttaactgtgacacttgccacactgtgtcgtcgtttgtttgcctatgttctccagggcacggtggcaggaacaactatcctcgtctgtcccaacactgagcaggcactcggtaaacacgaatgaatggataagcgcacggatgaatggagcttacaagatctgtctttccaatggccgggggcatttggtccccaaattaaggctattggacatctgcacaggacagtcctatttttgatgtcctttcctttctgaaaataaagttttgtgctttggagaatgactcgtgagcacatctttagggaccaagagtgactttctgtaaggagtgactcgtggcttgccttggtctcttgggaatacttttctaactagggttgctctcacctgagacattctccacccgcggaatctcagggtcccaggctgtgggccatcacgacctcaaactggctcctaatctccagctttcctgtcattgaaagcttcggaagtttactggctctgctcccgcctgttttctttctgactctatctggcagcccgatgccacccagtacaggaagtgacaccagtactctgtaaagcatcatcatccttggagagactgagcactcagcaccttcagccacgatttcaggatcgcttccttgtgagccgctgcctccgaaatctcctttgaagcccagacatctttctccagcttcagacttgtagatataactcgttcatcttcatttactttccactttgccccctgtcctctctgtgttccccaaatcagagaatagcccgccatcccccagatcacctgtctggattcctccccattcacccaccttgccaggtgcaggtgaggatggtgcaccagacagggtagctgtcccccaaaatgtgccctgtgcgggcagtgccctgtctccacgtttgtttccccagtgtctggcggggagccaggtgacatcataaatacttgctgaatgaatgcagaaatcagcggtactgacttgtactatattggctgccatgatagggttctcacagcgtcatccatgatcgtaagggagaatgacattctgcttgagggagggaatagaaaggggcagggaggggacatctgagggcttcacagggctgcaaagggtacagggattgcaccagggcagaacaggggagggtgttcaaggaagagtggctcttagcagaggcactttggaaggtgtgaggcataaatgcttccttctacgtaggccaacctcaaaactttcagtaggaatgttgctatgatcaagttgttctaacactttagacttagtagtaattatgaacctcacatagaaaaatttcatccagccatatgcctgtggagtggaatattctgtttagtagaaaaatcctttagagttcagctctaaccagaaatcttgctgaagtatgtcagcaccttttctcaccctggtaagtacagtatttcaagagcacgctaagggtggttttcattttacagggctgttgatgatgggttaaaaatgttcatttaagggctacccccgtgtttaatagatgaacaccacttctacacaaccctccttggtactgggggagggagagatctgacaaatactgcccattcccctaggctgactggatttgagaacaaatacccacccatttccaccatggtatggtaacttctctgagcttcagtttccaagtgaatttccatgtaataggacattcccattaaatacaagctgtttttactttttcgcctcccagggcctgtgcgatctggtcccccagcctctcttgggctttcttacactaactctgtacctaccatctcctgcctcccttaggcaggcacctccaaccaccacacactccctgctgttttccctgcctggaactttcccaccagccccaccaagatcatttcatccagtcctgagctcagcttaagggaggcttcttgcctgtgggttccctcacccccatgcctgtcctccaggctggggcaggttcttagtttgcctggaattgttctgtacctctttgtagcacgtagtgttgtgaaactaagccactaattgagtttctggctcccctcctggggttgtaagttttgttcattcatgagggccgactgtatttcctggttactgtatcccagtgaccagccacaggagatgtccaataaagtatgtgatgaaatggtcttaaaaaaaaaaaaaaaaaaaaaa

SEQ ID NO: 511 - DNA, 60 bp, Homo sapiens
ctggatttgagaacaaatacccacccatttccaccatggtatggtaacttctctgagctt

SEQ ID NO: 512 - DNA, 1820 bp, Homo sapiens
gagctccaagctggtttgaacaagccctgggcatgtttggcgggaagttggcttagctcggctacctgtggccccgcagttttgtagtccccgccttgtttctccccagaggcctctcaatcctccctccatgatcttcgcatagagcacagtaccccttcacacggaggacgcgatggctcccaagaaacgcccagaaacccagaagacctccgagattgtattacgccccaggaacaagaggagcaggagtcccctggagctggagcccgaggccaagaagctctgtgcgaagggctccggtcctagcagaagatgtgactcagactgcctctgggtggggctggctggcccacagatcctgccaccatgccgcagcatcgtcaggaccctccaccagcataagctgggcagagcttcctggccatctgtccagcaggggctccagcagtcctttttgcacactctggattcttaccggatattacaaaaggctgccccctttgacaggagggctacatccttggcgtggcacccaactcaccccagcaccgtggctgtgggttccaaagggggagatatcatgctctggaattttggcatcaaggacaaacccaccttcatcaaagggattggagctggagggagcatcactgggctgaagtttaaccctctcaataccaaccagttttacgcctcctcaatggagggaacaactaggctgcaagactttaaaggcaacattctacgagtttttgccagctcagacaccatcaacatctggttttgtagcctggatgtgtctgctagtagccgaatggtggtcacaggagacaacgtggggaacgtgatcctgctgaacatggacggcaaagagctttggaatctcagaatgcacaaaaagaaagtgacgcatgtggccctgaacccatgctgtgattggttcctggccacagcctccgtagatcaaacagtgaaaatttgggacctgcgccaggttagagggaaagccagcttcctctactcgctgccgcacaggcatcctgtcaacgcagcttgtttcagtcccgatggagcccggctcctgaccacggaccagaagagcgagatccgagtttactctgcttcccagtgggactgccccctgggcctgatcccgcaccctcaccgtcacttccagcacctcacacccatcaaggcagcctggcatcctcgctacaacctcattgttgtgggccgatacccagatcctaatttcaaaagttgtaccccttatgaattgaggacgatcgacgtgttcgatggaaactcagggaagatgatgtgtcagctctatgacccagaatcttctggcatcagttcgcttaatgaattcaatcccatgggggacacgctggcctctgcaatgggttaccacattctcatctggagccaggaggaagccaggacacggaagtgagagacactaaagaaggtgtgggccagacaaggccttggagcccacacatgggatcaagtcctgcaagcagaggtggtgatttgttaaagggccaaaagtatccaaggttagggttggagcaggggtgctgggacctggggcactgtgggactgggacacttttatgttaatgctctggacttgcctccagagactgctccagagttggtgacacagctgtcccaagggcccctctgtatctagcctggaaccaaggttatcttggaactaaatgacttttctcctctcagtgggtggtagcagagggatcaagcagttatttgatttgtgctcttttgatatggccaataaaaccataccg

SEQ ID NO: 513 - DNA, 60 bp, Homo sapiens
cgatacccagatcctaatttcaaaagttgtaccccttatgaattgaggacgatcgacgtg

SEQ ID NO: 514 - DNA, 486 bp, Homo sapiens
aatatgtttgaattctaagaggaaatattttcccataattgtatatcagagaaatatagtgatatacaatttccttgaaaaccaatttctaaataattttcttctctgtaatctaagtgtaaaaaggtttagttttttaataggtttaggtgtttataagcaatagttctctattttctagttgatataagtagaagaattgacaagtgagatggaaatgttaatttataaagggaaagaaaagctaggtgaggttgagttataattaaactgttcaggaaacatcgtaaaggctttaggctccctttttcatttctataccaattaatctcatgggttctagagtggttagttctacgggaattgtttttgtttttgtttttaaagatgctgaaaactactctcaatcaaattagtaccatcatttaagctttgaatacttggcagtaattgcctgggctcgtcaataaatgttagcaaattctt

SEQ ID NO: 515 - DNA, 60 bp, Homo sapiens
ctactctcaatcaaattagtaccatcatttaagctttgaatacttggcagtaattgcctg

SEQ ID NO: 516 - DNA, 2338 bp, Homo sapiens
agcgcacgtcggcagtcggctccctcgttgaccgaatcaccgacctctctccccagctgtatttccaaaatgtcgctttctaacaagctgacgctggacaagctggacgttaaagggaagcgggtcgttatgagagtcgacttcaatgttcctatgaagaacaaccagataacaaacaaccagaggattaaggctgctgtcccaagcatcaaattctgcttggacaatggagccaagtcggtagtccttatgagccacctaggccggcctgatggtgtgcccatgcctgacaagtactccttagagccagttgctgtagaactcaaatctctgctgggcaaggatgttctgttcttgaaggactgtgtaggcccagaagtggagaaagcctgtgccaacccagctgctgggtctgtcatcctgctggagaacctccgctttcatgtggaggaagaagggaagggaaaagatgcttctgggaacaaggttaaagccgagccagccaaaatagaagctttccgagcttcactttccaagctaggggatgtctatgtcaatgatgcttttggcactgctcacagagcccacagctccatggtaggagtcaatctgccacagaaggctggtgggtttttgatgaagaaggagctgaactactttgcaaaggccttggagagcccagagcgacccttcctggccatcctgggcggagctaaagttgcagacaagatccagctcatcaataatatgctggacaaagtcaatgagatgattattggtggtggaatggcttttaccttccttaaggtgctcaacaacatggagattggcacttctctgtttgatgaagagggagccaagattgtcaaagacctaatgtccaaagctgagaagaatggtgtgaagattaccttgcctgttgactttgtcactgctgacaagtttgatgagaatgccaagactggccaagccactgtggcttctggcatacctgctggctggatgggcttggactgtggtcctgaaagcagcaagaagtatgctgaggctgtcactcgggctaagcagattgtgtggaatggtcctgtgggggtatttgaatgggaagcttttgcccggggaaccaaagctctcatggatgaggtggtgaaagccacttctaggggctgcatcaccatcataggtggtggagacactgccacttgctgtgccaaatggaacacggaggataaagtcagccatgtgagcactgggggtggtgccagtttggagctcctggaaggtaaagtccttcctggggtggatgctctcagcaatatttagtactttcctgccttttagttcctgtgcacagcccctaagtcaacttagcattttctgcatctccacttggcattagctaaaaccttccatgtcaagattcagctagtggccaagagatgcagtgccaggaacccttaaacagttgcacagcatctcagctcatcttcactgcaccctggatttgcatacattcttcaagatcccatttgaattttttagtgactaaaccattgtgcattctagagtgcatatatttatattttgcctgttaaaaagaaagtgagcagtgttagcttagttctcttttgatgtaggttattatgattagctttgtcactgtttcactactcagcatggaaacaagatgaaattccatttgtaggtagtgagacaaaattgatgatccattaagtaaacaataaaagtgtccattgaaaccgtgatttttttttttttcctgtcatactttgttaggaagggtgagaatagaatcttgaggaacggatcagatgtctatattgctgaatgcaagaagtggggcagcagcagtggagagatgggacaattagataaatgtccattctttatcaagggcctactttatggcagacattgtgctagtgcttttattctaacttttatttttatcagttacacatgatcataatttaaaaagtcaaggcttataacaaaaaagccccagcccattcctcccattcaagattcccactccccagaggtgaccactttcaactcttgagtttttcaggtatatacctccatgtttctaagtaatatgcttatattgttcacttcctttttttttattttttaaagaaatctatttcataccatggaggaaggctctgttccacatatatttccacttcttcattctctcggtatagttttgtcacaattatagattagatcaaaagtctacataactaatacagctgagctatgtagtatgctatgattaaatttacttatgtaaaaaaaaaaaaaaaaaaaa

SEQ ID NO: 517 - DNA, 60 bp, Homo sapiens
acttagcattttctgcatctccacttggcattagctaaaaccttccatgtcaagattcag

SEQ ID NO: 518 - DNA, 2382 bp, Homo sapiens
agtaattccgggaagctcgccttacaactccgcgcggcctcggccccctgcgccgcccgccccacaacaaaactcagcgcagcgctcccgggcgcccggttcagagcgacctgcggctcagagcggaggggagactgaccggagcgcggatcgggacagcggccgggacagcggcgagacgcgcgtgtgtgagcgcgccggaccaagcgggcccagaagcgggtctgcagcccagagggcaccttctgcaaacatgtctgtggatcccctatccagcaaagctctaaagatcaagcgagagctgagcgagaacacgccgcacctgtcggacgaggcgctgatggggctgtcggtgcgcgagctgaaccggcatctgcgcgggctctccgccgaggaggtgacacggctcaagcagcggcgccgcacactcaaaaaccgtggctacgccgccagctgccgcgtgaagcgcgtgtgccagaaggaggagctgcagaagcagaagtcggagctggagcgcgaggtggacaagctggcgcgcgagaacgccgccatgcgcctggagctcgacgcgctgcgcggcaagtgcgaggcgctgcagggcttcgcgcgctccgtggccgccgcccgcgggcccgccacgctcgtggcgccggccagcgtcatcaccatcgtcaagtccaccccgggctcggggtctggccccgcccacggcccggaccccgcccacggcccggcctcctgctcctagtgcccgcccccgccatgcctcagccacgcccctccggcctcagctccctccccaaagtgcctgagcgccgcctctgtgcccaggtcccatttctctgcagcactggccccttggtgcacacacattcccttcgtgggccctgtcttcctcttgcagccccccaaactgggaccgaatgaccctgggaaggggaacttgggtaggttggggatggggcagaggtctggatctgggatcgcccttggctgaaagtttagcctttttagattgagagatacagagccggcttagagaacagctgttgggggagaagagggcacccctcatcttggaaactgctcttattgtgccaatatgccctccaaaccctcccaggattcaaagctaggtttggctgtctgtgacttacgggaccgtcctgctgagaaattgcactgaagagatgcccccacctctggttgggcctgggggtgcctggccttccgaaactaaaagagtgggtgggaagactagtgaaacccagttcacggatggggaaacaggcctgaggtcacatttcacttagtggttgtgttgggaccaaaacctgggtgtcctcactgctgccctgagtccagccatggttttcagggggacagtggacagggactcagaaatgtggtgggagggcctccctggcttgggagaccgctctctgcaagggagggggagagaagcagagggagagagaaggtgacacggatggaagagtgggaaggagctggcctggctcagccctaggctgtccctgcagccagggtgtccgggggctggccagtcagagaaagggggccatggactgctgtggcaaatagggagacaaggagacagaccctgcagtcctactacagtctggagtggggtcctaagaagaagggtcccacctcaacccctgtcagtgtccactgtggggtgggggctgacccctgcctttgattgtcattctcctgggaagcccagtctcagtccctcccccaacactgtccacactgcccctccccactgtttatttattgcacggatctaagttattctccccagccagagcccgagctcctgctccctgggaaaagtggcgtatggccctgagctgggctttatattttatatctgcaaataaatcacattttatcttatatttagggaaagccggagagcaacaacaaaaaatgtttaagccgggcgcggtggctcacatctgtaatcccagcactttgggagtccaaggagggggatcgcttgagtccaggagtttgagaccagcctggacaacatggtgaaaccccgtctctacaaaaaatacaaaaattagccatgcatggtggctcatgcctgtagtcccagctacttgggaggctgaggcaggaggatcacttaagcccagaaggcagaggttgtagtgagctgagatcgcaccactgcactccagcctgggcaacatagcaaaatcctgtctcaaaaaaaaagttaaaaaatattgcccggctcctagaatttatttatttcctgacttacagcaagcgagttatcgtcttctgtattttgtagactttctaaataaagtcaaattctttctttttccacagagaaaaaaa

SEQ ID NO: 519 - DNA, 60 bp, Homo sapiens
agtggcgtatggccctgagctgggctttatattatatatctgcaaataaatcacatttta

SEQ ID NO: 520 - DNA, 1370 bp, Homo sapiens
ggcggcggcagctgtacagggcgggagaagcggtggtagcggaggctgtagtggggctggtggtgcttccaactgcgggacaggaagtggccgtagcggcttgttggataagtggaagatagatgataagcctgtaaaaattgacaagtgggatggatcagctgtgaaaaactctttggatgattctgccaaaaaggtacttctggaaaaatacaaatatgtggagaattttggtctaattgatggtcgcctcaccatctgtacaatctcctgtttctttgccatagtggctttgatttgggattatatgcacccctttccagagtccaaacccgttttggctttgtgtgtcatatcctattttgtgatgatggggattctgaccatttatacctcatataaggagaagagcatctttctcgtggcccacaggaaagatcctacaggaatggatcctgatgatatttggcagctgtcctccagtcttaaaaggtttgatgacaaatacaccttgaagctgaccttcatcagtgggagaacaaagcagcagcgggaagccgagttcacaaagtccattgctaagttttttgaccacagtgggacactggtcatggatgcatatgagcctgaaatatccaggctccatgacagtcttgccatagaaagaaaaataaagtagccaattctaaaagtagccctctttctcctggatcttgctgaattagtggcttggggggtgggggagataaaaagaacttaaaatgggtaaagtaagaaatgttaaaaagtccctgttttgtcctgaaattttagtctattctgggtaaataggattttctgacacagatatgagaagttgtagctctgatgtctagctgtagtctccttgatctgctgattgcattattttaatttgcttttctgggaaagcagttttgctaaaagctgtacagactttttcttttgtacctagcagtactttatatagtatagctttgggccatgtagcattttaagactcaattttaaaaaattattaatctgttgctgactcttaattcctatttcaatatgtgtttccttgaagaattcaggatacaacttcttgtgtatgacagctttccttcacacactatttttgtgggtgtgtatatatctgatttgggaagaatttaaaaaacacatagctttttaatttgtttgaaacagactttctgcctgttacatttttgcttttaaccaattaaagaagccaatggcattttagttttatattgtgttttccactagtatatccctgttgatttgtttgtgccttttattaactgccattttctaaaatttttttcaataaaaggaaggaagatgtg

SEQ ID NO: 521 - DNA, 60 bp, Homo sapiens
ggattttctgacacagatatgagaagttgtagctctgatgtctagctgtagtctccttga

SEQ ID NO: 522 - DNA, 277 bp, Homo sapiens
gatttctctcgccttccaataaaaacttcccttcctgtgccccagtccctcagagtccacaagaggttcaacttgctcatctgatgtgtgaattacatcacacagttgaatgagaatttgttaattacaacagaacttttataaatatgtcacttactgtaaaaaaaaaaaaaaaaaaaaaaaaaaaaaaaaaaaaaaaaaaaaaaaaaaaaaaaaaaaaaaaaaaaaaaaaaaaaaaaaaaaaaaaaaaaaaaaaaaaaaaaaaaaaaaaaaaaaa

SEQ ID NO: 523 - DNA, 60 bp, Homo sapiens
gcaattcgaagtccctttaattgttttgtgcttccaacctgttttgttcccgttcagatt

SEQ ID NO: 524 - DNA, 2972 bp, Homo sapiens
tcttcggacctaggctgccctgccgtcatgtcgcaagggatcctttctccgccagcgggcttgctgtccgatgacgatgtcgtagtttctcccatgtttgagtccacagctgcagatttggggtctgtggtacgcaagaacctgctatcagactgctctgtcgtctctacctccctagaggacaagcagcaggttccatctgaggacagtatggagaaggtgaaagtatacttgagggttaggcccttgttaccttcagagttggaacgacaggaagatcagggttgtgtccgtattgagaatgtggagacccttgttctacaagcacccaaggactcgtttgccctgaagagcaatgaacggggaattggccaagccacacacaggttcaccttttcccagatctttgggccagaagtgggacaggcatccttcttcaacctaactgtgaaggagatggtaaaggatgtactcaaagggcagaactggctcatctatacatatggagtcactaactcagggaaaacccacacgattcaaggtaccatcaaggatggagggattctcccccggtccctggcgctgatcttcaatagcctccaaggccaacttcatccaacacctgatctgaagcccttgctctccaatgaggtaatctggctagacagcaagcagatccgacaggaggaaatgaagaagctgtccctgctaaatggaggcctccaagaggaggagctgtccacttccttgaagaggagtgtctacatcgaaagtcggataggtaccagcaccagcttcgacagtggcattgctgggctctcttctatcagtcagtgtaccagcagtagccagctggatgaaacaagtcatcgatgggcacagccagacactgccccactacctgtcccggcaaacattcgcttctccatctggatctcattctttgagatctacaacgaactgctttatgacctattagaaccgcctagccaacagcgcaagaggcagactttgcggctatgcgaggatcaaaatggcaatccctatgtgaaagatctcaactggattcatgtgcaagatgctgaggaggcctggaagctcctaaaagtgggtcgtaagaaccagagctttgccagcacccacctcaaccagaactccagccgcagtcacagcatcttctcaatcaggatcctacaccttcagggggaaggagatatagtccccaagatcagcgagctgtcactctgtgatctggctggctcagagcgctgcaaagatcagaagagtggtgaacggttgaaggaagcaggaaacattaacacctctctacacaccctgggccgctgtattgctgcccttcgtcaaaaccagcagaaccggtcaaagcagaacctggttcccttccgtgacagcaagttgactcgagtgttccaaggtttcttcacaggccgaggccgttcctgcatgattgtcaatgtgaatccctgtgcatctacctatgatgaaactcttcatgtggccaagttctcagccattgctagccagcttgtgcatgccccacctatgcaactgggattcccatccctgcactcgttcatcaaggaacatagtcttcaggtatcccccagcttagagaaaggggctaaggcagacacaggccttgatgatgatattgaaaatgaagctgacatctccatgtatggcaaagaggagctcctacaagttgtggaagccatgaagacactgcttttgaaggaacgacaggaaaagctacagctggagatgcatctccgagatgaaatttgcaatgagatggtagaacagatgcaacagcgggaacagtggtgcagtgaacatttggacacccaaaaggaactattggaggaaatgtatgaagaaaaactaaatatcctcaaggagtcactgacaagtttttaccaagaagagattcaggagcgggatgaaaagattgaagagctagaagctctcttgcaggaagccagacaacagtcagtggcccatcagcaatcagggtctgaattggccctacggcggtcacaaaggttggcagcttctgcctccacccagcagcttcaggaggttaaagctaaattacagcagtgcaaagcagagctaaactctaccactgaagagttgcataagtatcagaaaatgttagaaccaccaccctcagccaagcccttcaccattgatgtggacaagaagttagaagagggccagaagaatataaggctgttgcggacagagcttcagaaacttggtgagtctctccaatcagcagagagagcttgttgccacagcactggggcaggaaaacttcgtcaagccttgaccacttgtgatgacatcttaatcaaacaggaccagactctggctgaactgcagaacaacatggtgctagtgaaactggaccttcggaagaaggcagcatgtattgctgagcagtatcatactgtgttgaaactccaaggccaggtttctgccaaaaagcgccttggtaccaaccaggaaaatcagcaaccaaaccaacaaccaccagggaagaaaccattccttcgaaatttacttccccgaacaccaacctgccaaagctcaacagactgcagcccttatgcccggatcctacgctcacggcgttcccctttactcaaatctgggccttttggcaaaaagtactaaggctgtggggaaagagaagagcagtcatggccctgaggtgggtcagctactctcctgaagaaataggtctcttttatgctttaccatatatcaggaattatatccaggatgcaatactcagacactagcttttttctcacttttgtattataaccacctatgtaatctcatgttgttgtttttttttatttacttatatgatttctatgcacacaaaaacagttatattaaagatattattgttcacattttttattgaaaaaaaaaaaaaa

SEQ ID NO: 525 - DNA, 60 bp, Homo sapiens
tgctttaccatatatcaggaattatatccaggatgcaatactcagacactagcttttttc

SEQ ID NO: 526 - DNA, 3433 bp, Homo sapiens
cccagctcggtgctgccgccatcttcttggaggacaggaggagaggcgaaggctccccctccccgtgatcgctccgcactcccgccaccacctgccctcccgcgaccgcctctctcctcctcagtgggcacttgtctccttctaacaaacggccttccccccactccagttacccaccgcaaggcgaagattctcattacctgttccactcttataagcataagaaaaccgagctcataagacgaagcttcacaaaagatgtctaagcaacagccaactcagtttataaatccagaaacacctggctatgttggatttgcaaacctccccaatcaagttcaccgaaaatcagtgaaaaaaggttttgagttcacactgatggtggtcggtgaatcaggtctaggaaaatcgactctcataaacagcctattcctaactgatctgtacccagaaagagtcatacctggagcagcagaaaaaattgaaagaactgtccagattgaggcttcaactgttgaaattgaagagcgaggggtcaagctacgcctgacagtggtagatacccctggctatggtgacgctatcaactgcagagattgttttaagacaattatctcctatattgatgagcaatttgagaggtacctgcatgacgagagcggcttgaacaggcggcacatcattgataatagggtgcattgttgcttttactttatttcaccttttggacatggacttaagcccttagatgtggcgtttatgaaggcaatacacaacaaggtgaatattgtgcctgtcattgcaaaagctgacactctcaccctgaaggaacgggagcggctgaagaaaaggattctggatgaaattgaagaacataacatcaaaatctatcacttacctgatgcagaatcagatgaagatgaagattttaaagagcagactagacttctcaaggctagcatcccattctctgtggttggatccaatcagttgattgaagccaaaggaaagaaggtcagaggccgcctctacccctggggtgttgtggaagtggagaacccagagcacaatgactttctgaagctgagaaccatgctcatcacccacatgcaggatctccaggaggtgacccaggaccttcattatgaaaacttccgttctgagagactcaagagaggcggcaggaaagtggagaatgaggacatgaataaagaccagatcttgctggaaaaagaagctgagctccgccgcatgcaagagatgattgcaaggatgcaggcgcagatgcagatgcagatgcagggcggggatggcgatggcggggctctcgggcaccacgtgtaaggtgatgtgcacatatcaagaagtcagagaaaacactttcctggataaaaaagaaaacattccagatgcatgatccagctgtgtgttttcaatccttgggagggtgccatccacattttaacagtacctgtgcctgagaatttaatttttaaaagactttgatgtgtttttgtatgaagtacttttaacgtatgtatttcattgctgtgtcacactctgtgttttgtgaggtgaatgtcttccttttctttctccctaaccactaatgttagaattgatttccaagaatcggcatgtatacttaatactgaatttctttgatttaactgacttaacaactgactaaccattgatgagcactcctgatttttatctagaacattcagatttaccataatgttccttagtggtagaggtgtgtgcctagtgatgtagaaagatacactgacttggtgcaaggccatctgcttaccacatcacaccacttggagatctttgcttccttgcttttatgtttgtacacaacacctaaaaccagttttgctgctataattctatactgttgattcgtctgcgattttatctgttaaccaaataaaacataatagaatttcctaatgagatatatctttatacttaaacagcttttttagaggtgagttttaaagaagtctcttaattctgatgctaggttgtttttaaaaccactatgcaaagaactcaccacaagccaccttttgtagtgttctccactaatactggttatcctgtgctacagagaaaatcaaagcagtcataagctccagttttccgtattgcaaataagactcttacctacaaaatgagattccagtgaactaatttggtttttactcaaccaaattaaaaatttttttaaggaaaattagcagttggtctattcagaatcaaacctttttatattttatactgcactttagtgtattttctgtcactgtaggtatagaagatctgcctcccctgtggaaattggggtctgttggtgggcttgcccctgaagcctggcttgggttgaaaagtgttcccgccctaaggccttggtgccctgaacctctgatgcctaccgggttctcctgatttgagtttcctttaaatactccctttttgagtaattttctgatgggaggaaagtagcagtcatcatctttttgtgtgcaggctgtctcatttatttttagccattgtcgtttcattcattttgtgtaatataaaccgtgtgtcatgtcaaagtgaaagacatttcaaatctgtagcataggctagtgggcaggtccgcacagtcgaagccacacctggtctgttttctgtgcactgtagccttagtgtcacctttcttcttgtgtctccttatggtacactccagcggttgccttttttatcatttctactgaagttgggaaattcaaccccagaaattgacagatgaaaggagacaatggttgtgtagggagatggagaaaatgcttaatctgaggatgagacagggttttttcatttttgtgggggctagaaaaaacataaaatgaggcagttaaataataatagttaatgaaggtgtgctacagaaaataatctggtgttcttgctaactttgcccttcactgttgcttaattgtgaacagccaaaagctatatgttatggcttattgtgtgaaggtaactaagaagtggtgttccatgacttcagagtacatccatgcggagtccattatttgagtttgacatttaataactttgctggaaaatctgtaaaaaagaaaaacaagtttgctagtgactaagccccgcatatgtgagtgaaagtacttcaggcacgctgcctcctggtaacagctatgcagggagggaggacccacactgctacacttctgatcccctttggttttactacccaaatctaaatagatacttttgataatagataactgctcttttactaagacatagtctctacctatagaaatgtattttgaaaacacttattttacacagcaattttgtatccatttaaactaaccttttatcaataaagcactattgtttagatatt

SEQ ID NO: 527 - DNA, 60 bp, Homo sapiens
ctggaaaatctgtaaaaaagaaaaacaagtttgctagtgactaagccccgcatatgtgag

SEQ ID NO: 528 - DNA, 2509 bp, Homo sapiens
gcgcgctccgctcggcagcctgtgggacgcgaccgcggcgctagtctcgttcctttgtgctgcggcggcggcttctcgagtcctccccgacgcgtcctctaggccagcgagccccgcgctctccggtgacggaccatgtcggcggcgggagcgggcgcgggcgtagaggcgggcttctccagcgaggagctgctctcgctccgtttcccgctgcaccgcgcctgccgcgacggggacctggccacgctctgctcgctgctgcagcagacaccccacgcccacctggcctctgaggactccttctatggctggacgcccgtgcactgggccgcgcatttcggcaagttggagtgcttagtgcagttggtgagagcgggagccacactcaacgtctccaccacacggtacgcgcagacgccagcccacattgcagcctttgggggacatcctcagtgcctggtctggctgattcaagcaggagccaacattaacaaaccggattgtgagggtgaaactcccattcacaaggcagctcgctctgggagcctagaatgcatcagtgcccttgtggcgaatggggctcacgtcgacctgagaaatgccagtggcctgacagcagcagacattgcacaaacccagggtttccaagagtgtgcccagtctctcttgaacctccagaattgtcatctgaaccatttctataacaatggcatcttaaatgggggtcatcagaatgtatttcctaatcatattagtgtgggaacaaatcgaaagagatgcttggaggactcagaagactttggagtaaagaaagctagaactgaagctcaaagcttggattctgccgtgccactcacgaatggcgacacagaagacgatgctgacaaaatgcacgttgatagggagtttgctgttgtaacagatatgaaaaacagtagctccgtatcgaatacattgacaaatggatgtgtcatcaatggacatttggacttcccctccacgaccccgctcagtgggatggaaagcaggaatggccagtgcttgacaggaactaacggaattagcagtggattagccccaggacagccgtttccgagtagccagggttctctctgcattagtgggactgaggagccagagaagaccctgagagctaaccctgagttgtgcggttctctgcacctgaacgggagtccaagtagctgcatagccagtaggccttcctgggtggaagacattggggataacctgtactatggacactaccacgggtttggggacactgctgaaagcatcccagaactgaacagtgtggtcgagcattccaagtccgtgaaggtgcaggagcggtacgacagtgccgtgctgggcaccatgcacctgcaccacggctcctagagacgctgacctggctctcggaaacgcaggagtccttcctggtagccagctcagaatacccatgtagcagcaacttgaacgaatgtcacaacttgtactttttttatatacttcaactttctgaaaaagtaaacttcgacaagttcccagcaactgcttgtttgtgcatgagtagggcttactaagtgcatagatgtttctacagtgaggtgtcctttttataaggtgcacttttggagtttttctgatgccaatctcaacattgtctttttaatactgtcaccagatattgccatttttctttttgttaaaagattatatgatcaagataaattggggtggtaaatcaggtgcctggtaatttatctctttgcacatgggcatcattttaaaaagcttgcttccactcttttctgtagaatttgacggaacacagctatttccctatgcaaggtacagccttacaaagatttctgcagtgatttgtgtgaagaagagaatgtttgtctttttcaatgaagctttgcagatcaccatgtggttgaaggttttagttgtggacacagtggtccctccttaatgatgaagatcactgccttgggcttcatggaaaacaggcccagcctggggctgcgtttggatttattgtttttattccacacttcctacttggtctctggaggttttaccacatgtaacagattcctttatatgtagtgaaaatcactatttgtagaaactgtcaggtcaaaatatttaactgactgttgacatgtattttcttttttccttgttttgttttttggggttttctgctttaagatatataccactatgtatatccagttaactgagagaattttgactctcttaataaaactgcattaagtttttgattttgtagaaattagcttttgtctaggcaactagtggttatactctgcaaatattgtaatgaatttttacttttttgatttttgtaataaaaattggtgcagataaaatgtcaaatgaacaaaccagtgttctaagagtgttactaacattttgttctaaaactgtccttcacaaattgaataaaaaactctcacactcaaaaaaaaaaaaaaaa

SEQ ID NO: 529 - DNA, 60 bp, Homo sapiens
acttggtctctggaggttttaccacatgtaacagattcctttatatgtagtgaaaatcac

SEQ ID NO: 530 - DNA, 4221 bp, Homo sapiens
cgataacgatttgtgttgtgagaggcgcaagctgcgatttctgctgaacttggaggcatttctacgacttttctctcagctgaggcttttcctccgaccctgatgctcttcaattcggtgctccgccagccccagcttggcgtcctgagaaatggatggtcttcacaataccctcttcaatcccttctgactggttatcagtgcagtggtaatgatgaacacacttcttatggagaaacaggagtcccagttcctccttttggatgtaccttctcttctgctcccaatatggaacatgtactagcagttgccaatgaagaaggctttgttcgattgtataacacagaatcacaaagtttcagaaagaagtgcttcaaagaatggatggctcactggaatgccgtctttgacctggcctgggttcctggtgaacttaaacttgttacagcagcaggtgatcaaacagccaaattttgggacgtaaaagctggtgagctgattggaacatgcaaaggtcatcaatgcagcctcaagtcagttgccttttctaagtttgagaaagctgtattctgtacgggtggaagagatggcaacattatggtctgggataccaggtgcaacaaaaaagatgggttttataggcaagtgaatcaaatcagtggagctcacaatacctcagacaagcaaaccccttcaaaacccaagaagaaacagaattcaaaaggacttgctccttctgtggatttccagcaaagtgttactgtggtcctctttcaagacgagaataccttagtctcagcaggagctgtggatgggataatcaaagtatgggatttacgtaagaattatactgcttatcgacaagaacccatagcatccaagtctttcctgtacccaggtagcagcactcgaaaacttggatattcaagtctgattttggattccactggctctactttatttgctaattgcacagacgataacatctacatgtttaatatgactgggttgaagacttctccagtggctattttcaatggacaccagaactctaccttttatgtaaaatccagccttagtccagatgaccagtttttagtcagtggctcaagtgatgaagctgcctacatatggaaggtctccacaccctggcaacctcctactgtgctcctgggtcattctcaagaggtcacgtctgtgtgctggtgtccatctgacttcacaaagattgctacctgttctgatgacaatacactaaaaatctggcgcttgaatagaggcttagaggagaaaccaggaggtgataaactttccacggtgggttgggcctctcagaagaaaaaagagtcaagacctggcctagtaacagtaacgagtagccagagtactcctgccaaagcccccagggtaaagtgcaatccatccaattcttccccgtcatccgcagcttgtgccccaagctgtgctggagacctccctcttccttcaaatactcctacgttctctattaaaacctctcctgccaaggcccggtctcccatcaacagaagaggctctgtctcctccgtctctcccaagccaccttcatctttcaagatgtcgattagaaactgggtgacccgaacaccttcctcatcaccacccatcactccacctgcttcggagaccaagatcatgtctccgagaaaagcccttattcctgtgagccagaagtcatcccaagcagaggcttgctctgagtctagaaatagagtaaagaggaggctagactcaagctgtctggagagtgtgaaacaaaagtgtgtgaagagttgtaactgtgtgactgagcttgatggccaagttgaaaatcttcatttggatctgtgctgccttgctggtaaccaggaagaccttagtaaggactctctaggtcctaccaaatcaagcaaaattgaaggagctggtaccagtatctcagagcctccgtctcctatcagtccgtatgcttcagaaagctgtggaacgctacctcttcctttgagaccttgtggagaagggtctgaaatggtaggcaaagagaatagttccccagagaataaaaactggttgttggccatggcagccaaacggaaggctgagaatccatctccacgaagtccgtcatcccagacacccaattccaggagacagagcggaaagacattgccaagcccggtcaccatcacgcccagctccatgaggaaaatctgcacatacttccatagaaagtcccaggaggacttctgtggtcctgaacactcaacagaattatagattctaatctgagtgagttactgagctttggtccactaaaacaagctgagctttggtccactaaaacaagatgaaaaatacaagagtgactctataactctggtctttaagaaagctgccttttcatttttagacaaaatcttttcaacgctgaaatgtacctaatctggttctactaccataatgtatatgcagcttcccgaggatgaatgctgtgtttaaatttcataaagtaaatttgtcactctagcattttgaatgaatagtcttcactttttaaattattcatcttctctataataatgacatcccagttcatggaggcaaaaaacaagtttcttgttatcctgaaactttctatgctcagtggaaagtatctgccagccacagcatgaggcctgtgaaggctgactgagaaatcctctgctgaagacccctggttctgttctgcctccaacatgtataattttatttgaaatacataatcttttcactatgcttttgtggggttttttttaagtatgtgtaaaaatgtgatgctcagataagtacatttatatcagttcagtgttaaaatgcagtctcttgagttaaagtcatctttattttaaatgcagtgataaatgtcaactcttcggagaaactaggagaacaacaacagaaagctgtgtttgtcttttttctctcaaatatatctcccgtatgagatttcaggtccccatgttttcaccaagcaatctgctatgtcagccaacccaacatcactttctacaggaggttatgatttttgccatttactagaggaagatgttttatgaaatcaatttggggtttgaattcaggtgcagtcatcagttctttaggggctgcaatgttttaaaaaaaataagtcatcagattttaagaaaaaagtgatgatttcttattgatatttttgtaacagaatatagctcttaactgaaaatccagaaccagaaacataaatcttgagtttcttttcatgtacataaaaagcaatagccttttagtatagatagccctgagccaaaaagtaatagaattttctctagatatttaatacagagagtgtatagactgactctaagttaataatgtgcaaaatatcttaaacatccctccccttattcaacaattatgtatcagtgatcttgaaccattgttttatatttttcacctttgtaacctcatggaaagaggctttacatactttctatgtactatttacttagaagggagcccccttccagtcatgaaacttcatttgttttatccatatccctgaggactgtgtagactttatgtcagttctgtgtagactttatgtcagtttttgtcattatttgaaaatctattctgacaactttttaattcctttgatcttataagttaaagctgtaacaactgaaattgcatggatcaagtaagcatagttttatccagggagaaaaataaaaggaagccatagaattgctctggtcaaaaccaagcacaccatagccttaactgaatatttaggaaatctgcctaatctgcttatatttggtgtttgttttttgactgttgggctttgggaagatgttatttatgaccaatatctgccagtaacgctgtttatctcacttgctttgaaagccaatgggggaaaaaaatccatgaaaaaaaaaagattgataaagtagatgattttgtttgtatccctacccatctcctggcagccctactgagtgaaattgggatacatttggctgtcagaaattataccgagtctactgggtataacatgtctcacttggaaagctagtacttttaaatgggtgccaaaggtcaactgtaatgagataattatccctgcctgtgtccatgtcagactttgagctgatcctgaataataaagccttttacctt

SEQ ID NO: 531 - DNA, 60 bp, Homo sapiens
catttggctgtcagaaattataccgagtctactgggtataacatgtctcacttggaaagc

SEQ ID NO: 532 - DNA, 1073 bp, Homo sapiens
ggcacgagggcggctgggagagcggtcggcggggtttcttcgttgcattgcctgagaggagcggagtctgccaggtggtgtccatcatgttctctttcaacatgttcgaccaccctattcccagggtcttccaaaaccgcttctccacacagtaccgctgcttctctgtgtccatgctagcagggcctaatgacaggtcagatgtggagaaaggagggaagataattatgccaccctcggccctggaccaactcagccgacttaacattacctatcccatgctgttcaaactgaccaataagaattcggaccgcatgacgcattgtggcgtgctggagtttgtggctgatgagggcatctgctacctcccacactggatgatgcagaacttactcttggaagaaggcggcctggtccaggtggagagcgtcaaccttcaagtggccacctactccaaattccaacctcagagccctgacttcctggacatcaccaaccccaaagccgtattagaaaacgcacttaggaactttgcctgtctgaccaccggggatgtgattgccatcaactataatgaaaagatctacgaactgcgtgtgatggagaccaaacccgacaaggcagtgtccatcattgagtgtgacatgaacgtggactttgatgctcccctgggctacaaagaacccgaaagacaagtccagcatgaggagtcgacagaaggtgaagccgaccacagtggctatgctggagagctgggcttccgcgctttctctggatctggcaatagactggatggaaagaagaaaggggtagagcccagcccctccccaatcaagcctggagatattaaaagaggaattcccaattatgaatttaaacttggtaagataactttcatcagaaattcacgtccccttgtcaaaaaggttgaagaggatgaagctggaggcagattcgtcgctttctctggagaaggacagtcattgcgtaaaaagggaagaaagccctaagtgaggactgttggctgattggaaaataataaaagaatcatttgcaaaaaaaaaaaaaaaaaa

SEQ ID NO: 533 - DNA, 60 bp, Homo sapiens
ctttgcctgtctgaccaccggggatgtgattgccattaactacaatgaaaagatctacga

SEQ ID NO: 534 - DNA, 1630 bp, Homo sapiens
gcgcagaggggcacggccctcactgccccggccggggcgagagcggctccgcccctcgagcgccgggtaggccggggccggcggggcccggaaggcgacgggaaggagccgagcttgggttatggcggcgccgggcgcgctgctggtgatgggcactctcgctctgtcgcccaggctggagtacagtggcgtgatctcggctcgctgcaacctctgcctcctgagttcgggcgattgtcatgcctcggcctccggagtagctggggttacaggcgtgcaccacaacacccggctgggttttgtatttttagttgagacggggttttgccgtgttggcagagctggtcccgaactcctggcctcaggtgatccgcctgcctcagcctcccaaagtgctgggattataggcgtgagccaagggctcaacctaacttggtcttaagtgtgatttctgctatgcacacttctggcttcaccagccatggagtttggccgggatggtctactcatccgtaggctgcatgtctccctgcgcagccttcaatagaatgaactaatgggaaaggtttcactgctctcgcaacctttggttacatccaggagcagatctcagtttggtacaactgtgtctaacacctctctgatagctttttagtgaaagaaagaggacctttgttaggcaacagtatccagctagaatttaatcacattgttctgttttcattatatacagcttttcaggtaccttctattcaagatccaccgtgggcgccctgctggcatctgagctgggatggaaattctatgatgctgatgattatcacccggaggaaaatcgaaggaagatgggaaaaggcataccgctcaatgaccaggaccggattccatggctctgtaacttgcatgacattttactaagagatgtagcctctggacagcgtgtggttctagcctgttcagccctgaagaaaacgtacagagacatattaacacaaggaaaagatggtgtagctctgaagtgtgaggagtcgggaaaggaagcaaagcaggctgagatgcagctcctggtggtccatctgagcgggtcgtttgaggtcatctctggacgcttactcaaaagagagggacattttatgccccctgaattattgcagtcccagtttgagactctggagcccccagcagctccagaaaactttatccaaataagtgtggacaaaaatgtttcagagataattgctacaattatggaaaccctaaaaatgaaatgacaatgattttgtatcagtggtccaaacagaactaagcataaatcattgtgccatcacaaacctcgttccagccgccttgcccatactagattctaaatgtttctaaaggcaaaccccaatgtgtcaagacagacttgtttaggtgtaattttaggaattatgctggttcatcaggaagcagagggggagttttaaaagtcaagcttaaattgaagtttaaattcatctataaccaaatcaaatgatcagaggaaattctgtaatcaatgctggaaatcgttacattgtttagaacattcttgctcatgcctgtatttgcacaaataaatgaaacttcgctgtcaaaaaaaaaaaaaaaa

SEQ ID NO: 535 - DNA, 60 bp, Homo sapiens
accccaatgtgtcaagacagacttgtttaggtgtaattttaggaattatgctggttcatc

SEQ ID NO: 536 - DNA, 2115 bp, Homo sapiens
ggtcaacgcctgcggctgttgatattcttgctcagaggccgtaactttggccttctgctcagggaagactctgagtccgacgttggcctacccagtcggaaggcagagctgcaatctagttaactacctcctttcccctagatttcctttcattctgctcaagtcttcgcctgtgtccgatccctatctactttctctcctcttgtagcaagcctcagactccaggcttgagctaggttttgtttttctcctggtgagaattcgaagaccatgtctacggaactcttctcatccacaagagaggaaggaagctctggctcaggacccagttttaggtctaatcaaaggaaaatgttaaacctgctcctggagagagacacttcctttaccgtctgtccagatgtccctagaactccagtgggcaaatttcttggtgattctgcaaacctaagcattttgtctggaggaaccccaaaatgttgcctcgatctttcgaatcttagcagtggggagataactgccactcagcttaccacttctgcagaccttgatgaaactggtcacctggattcttcaggacttcaggaagtgcatttagctgggatgaatcatgaccagcacctaatgaaatgtagcccagcacagcttctttgtagcactccgaatggtttggaccgtggccatagaaagagagatgcaatgtgtagttcatctgcaaataaagaaaatgacaatggaaacttggtggacagtgaaatgaaatatttgggcagtcccattactactgttccaaaattggataaaaatccaaacctaggagaagaccaggcagaagagatttcagatgaattaatggagttttccctgaaagatcaagaagcaaaggtgagcagaagtggcctatatcgctccccgtcgatgccagagaacttgaacaggccaagactgaagcaggtggaaaaattcaaggacaacacaataccagataaagttaaaaaaaagtatttttctggccaaggaaagctcaggaagggcttatgtttaaagaagacagtctctctgtgtgacattactatcactcagatgctggaggaagattctaaccaggggcacctgattggtgatttttccaaggtatgtgcgctgccaaccgtgtcagggaaacaccaagatctgaagtatgtcaacccagaaacagtggctgccttactgtcggggaagttccagggtctgattgagaagttttatgtcattgattgtcgctatccatatgagtatctgggaggacacatccagggagccttaaacttatatagtcaggaagaactgtttaacttctttctgaagaagcccatcgtccctttggacacccagaagagaataatcatcgtgttccactgtgaattctcctcagagaggggcccccgaatgtgccgctgtctgcgtgaagaggacaggtctctgaaccagtatcctgcattgtactacccagagctatatatccttaaaggcggctacagagacttctttccagaatatatggaactgtgtgaaccacagagctactgccctatgcatcatcaggaccacaagactgagttgctgaggtgtcgaagccagagcaaagtgcaggaaggggagcggcagctgcgggagcagattgcccttctggtgaaggacatgagcccatgataacattccagccactggctgctaacaagtcaccaaaaagacactgcagaaaccctgagcagaaagaggccttctggatggccaaacccaagattattaaaagatgtctctgcaaaccaacaggctaccaacttgtatccaggcctgggaatggattaggtttcagcagagctgaaagctggtggcagagtcctggagctggctctataaggcagccttgagttgcatagagatttgtattggttcagggaactctggcattccttttcccaactcctcatgtcttctcacaagccagccaactctttctctctgggcttcgggctatgcaagagcgttgtctaccttctttctttgtattttccttctttgtttccccctctttcttttttaaaaatggaaaaataaacactacagaatgag

SEQ ID NO: 537 - DNA, 60 bp, Homo sapiens
ataaggcagccttgagttgcatagagatttgtattggttcagggaactctggcattcctt

SEQ ID NO: 538 - DNA, 2119 bp, Homo sapiens
agcctgcccttggggctgcccacgcccccttcagatcctttgctccggagagagacctgtccgagcagaggcctggactacatctcccggcgtgcctggcagtgtggtggcctctgtgcgccgtctgcactcgttgcaggcgacgatgcagagggctgtaagtgtggtggcccgtctgggctttcgcctgcaggcattccccccggccttgtgtcgtccacttagttgcgcacaggaggtgctccgcaggacaccgctctatgacttccacctggcccacggcgggaaaatggtggcgtttgcgggttggagtctgccagtgcagtaccgggacagtcacactgactcgcacctgcacacacgccagcactgctcgctctttgacgtgtctcatatgctgcagaccaagatacttggtagtgacaggtgtaagctgatggagagtctagtggttggagacattgcagagctaagaccaaaccaggggacactgtcgctgtttaccaacgaggctggaggcatcttagatgacttgattgtaaccaatacttctgagggccacctgtatgtggtgtccaacgctggctgctgggagaaagatttggccctcatgcaggacaaggtcagggagcttcagaaccagggcagagatgtgggcctggaggtgttggataatgccctgctagctctgcaaggccccactgcagcccaggtactacaggccggcgtggcagatgacctgaggaaactgcccttcatgaccagtgctgtgatggaggtgtttggcgtgtctggctgccgcgtgacccgctgtggctacacaggagaggatggtgtggagatctcggtgccggtagcgggggcagttcacctggcaacagctattctgaaaaacccagaggtgaagctggcagggctggcagccagggacagcctgcgcctggaggcaggcctctgcctgtatgggaatgacattgatgaacacactacacctgtggagggcagcctcagttggacactggggaagcgccgccgagctgctatggacttccctggagccaaggtcattgttccccagctgaagggcagggtgcagcggaggcgtgtggggttgatgtgtgagggggcccccatgcgggcacacagtcccatcctgaacatggagggtaccaagattggtactgtgactagtggctgcccctccccctctctgaagaagaatgtggcgatgggttatgtgccctgcgagtacagtcgtccagggacaatgctgctggtagaggtgcggcggaagcagcagatggctgtagtcagcaagatgccctttgtgcccacaaactactataccctcaagtgaagctggctcagggtggggctgtcccttccaggagttttgcccctacaaggggttagtcaagaagctgaggcagaactcactgggggtgggcagttaaggtggaggctgattctaattgtctggttgaggggccacaccacctattccccccacctaactcatgccattccagcttccttcaggaccctgcttctgagtgacggaccagctcacacaatgtcttgtttcagtccatgatcccactgacctactcttgcctgctggagggtaatgagaagctttggttctgccatctctcccactctgccaggtgctggctgtggagcaaaggctcacctttgtggagaggataaaacctkcccaacctacctcaccatggtttttcacattgcaaagggtaataacatgggcagtgcggacttaggctaccccctccagtttgctttccgtaaatgcaaattgtccttactgcaagtcaggaatgattgctgactcacagtagggctgctatgcctgtgtgtaaacttggggatggctgagggaacatagactcactcttccacattcccaagttggtctagtgtgctgcccagtagcaaaccatggcagactcaccacctattctgagttccagggctgctgtagggcagggtgggcttcctcccagacttgccttaccctgggctgatctttgcccctggtatgcattaatggactccactgaatcctgaaaaaaaaattaaacttccttcttacttgcca

SEQ ID NO: 539 - DNA, 60 bp, Homo sapiens
aacctacctcaccatggtttttcacattgcaaagggtaataacatgggcagtgcggactt

SEQ ID NO: 540 - DNA, 1464 bp, Homo sapiens
gaaggcgctgcgggcactccggatcgcattcacaaagtcgtcgtagtccgcaggagtcagtaaacaaatgaagagctagaggaagggtcctctgaagagccactggcacaactgcagtcaggtcaaatgatttacctgtaatccaggaaacgtgggaagaataagtacgtgagagccagttgggagaaacaaagttgtgcaggccaagggcataaagcccaatctcgaaggcgcaaaggtgcaggttgcggtgaggaccctggtggccccctgaggaagatggatgtgtgaaaatggaagtgctgctgttgccccctgccttgatcagcactgtcttcgccagctcgaagtagaagtgtgcagctgcctctgatggctgattggtcttcgcccgggctcctccactggcactggcccggcgacttccactggaggatgaggagcccagggagtccgaagaagagctgctaatgctgtcactgtcctgacctcgaccccaggaggtgggggcccagccccctcgaagtggtctccggcttaaggtgggggaactatccgatgttgtttcaggggcactgctgtcaatgctggccatgcctaacccccaagagaagtcagtctcagaagtcaggagtcccagatgttaagactccaaccttcaggattatccttccctctatgctagcccacaggctatcctacctgtgtgcttcttcttaggccgtcctggggacccccatccccgtccattatagcctccacgactgccaagtgccaagcggctaggaaccttcccttctggccttggggtcaaagctgcctcagatggaagaccctcacagggggaatgtggggaactctctaggtgaggaaaacaggacgctgggatgagcccaggaaaggggacctcaacataggtccacaccattcatcccccctgcccagtgcccccacctcaccaggcacattcttctctgtgaagccctcagtggggcctggcccagcccctgccacactccctggttgagcaggccctgcagagcctgaggtcagtggttgcagggcccctggggcagatgggcccccgtgctttgaaggagacctctggctggctgtggttgggcggctagatgagtagaaagaactcagcgtctgtggcttatgtgtctggctctctcggtccaagagtttgtctaagatctggaagacagaagcagtgacctccagagaagcagtgacaggatgccctttagctcctgacttctattaccttcctttctccttgaaacagccaattgctacatcctcagggagccttccccacttacaaccacaggatgacctcctggtttacatgtctttttgtaacttatttaaccccaacatatcttggtatcctccattaacaccacagggcagaatatactgatagtcaataaatactgaaataagtgaaaaaaaaaa

SEQ ID NO: 541 - DNA, 60 bp, Homo sapiens
gtctttttgtaacttatttaaccccaacatatcttggtatcctccattaacaccacaggg

SEQ ID NO: 542 - DNA, 1290 bp, Homo sapiens
gtgagcggcaacatggcgtccaggtctaagcggcgtgccgtggaaagtggggttccgcagccgccggatcccccagtccagcgcgacgaggaagaggaaaaagaagtcgaaaatgaggatgaagacgatgatgacagtgacaaggaaaaggatgaagaggacgaggtcattgacgaggaagtgaatattgaatttgaagcttattccctatcagataatgattatgacggaattaagaaattactgcagcagctttttctaaaggctcctgtgaacactgcagaactaacagatctcttaattcaacagaaccatattgggagtgtgattaagcaaacggatgtttcagaagacagcaatgatgatatggatgaagatgaggtttttggtttcataagccttttaaatttaactgaaagaaagggtacccagtgtgttgaacaaattcaagagttggttctacgcttctgtgagaagaactgtgaaaagagcatggttgaacagctggacaagtttttaaatgacaccaccaagcctgtgggccttctcctaagtgaaagattcattaatgtccctccacagatcgctctgcccatgtaccagcagcttcagaaagaactggcgggggcacacagaaccaataagccatgtgggaagtgctacttttaccttctgattagtaagacatttgtggaagcaggaaaaaacaattccaaaaagaaacctagcaacaaaaagaaagctgcgttaatgtttgcaaatgcagaggaagaatttttctatgaggagcagggaaaacctgaggtgcttggaggtccagacacaagaagaggattggaaccagttccgatacagcacaatggtggttcacgggggcaagtgacagccctggtttctctgaaggctggactaattcaatcaagatcaactctaagtgatttccagggaaccttcatgactgttggaattgctctgtcataataagtcagggatatttaggaggctcatagtctcctggagggataaaacatctcggcacctagtaatggtaaattagtcaatatttgttagtttcgtttgagatctcaaatgttaggattttctgaagtctcagtgtctttcagagtttgagataccttgttttcattttttctaatttttaatttaaaagtaataaagaatattttgtaatgattaggatgaaaattttatcgtcaattataagccaaaatttgctaaaattaaagtcagtatacttggaaaaaaaaaaaaaaaaaaaaaaaaaaaaaa

SEQ ID NO: 543 - DNA, 60 bp, Homo sapiens
gggaaccttcatgactgttggaattgctctgtcataataagtcagggatatttagggggc

SEQ ID NO: 544 - DNA, 1440 bp, Homo sapiens
gcgggcggtggggctcacggcctagggaggcgcggaggcatctggcagaggcgggtcgggctgggccagctggggtagagcggaggagcgggtgccggctgaagcggggcggtgggcgcggagcgcgctgggggcaccgacaccacctcaccggcagccgggtgctgagggccgcggtgtgggtgcgcggagcagtcagggcgcaggtgggcagcgcgcacggcctgccagcccggggcgccagaatcctgcgctgcggggccgagaggggcgccgcgcccgccgcagcctggagctttccgcgaacctcggggcgcccatgacggcggcggcgacggctaccgtgctcaaggagggcgtgctggagaagcgcagcggcgggctgctgcagctgtggaagcggaagcgctgcgtcctcaccgaacgcgggctgcagctcttcgaggccaagggcacgggcggccggcccaaggagctcagcttcgcccgcatcaaggccgtggagtgcgtggagagcaccgggcgccacatctacttcacgctggtgaccgaagggggcggcgagatcgacttccgctgccccctggaagatcccggctggaacgcccagatcaccctaggcctggtcaagttcaagaaccagcaggccatccagacagtgcgggcccggcagagcctcgggaccgggaccctcgtgtcctaaaccaccgggcgcaccatctttccttcatgctacccaccacctcagtgctgaggtcaaggcagcttcgttgttccctctggcttgtgggggcacggctgtgctccatgtggcaaggtggaaggcatggacgtgtggaggaggcgctggagctgaaggaatggacgagccctgggaggagggcagaaggctacgcagggctgaggatgaagatgcagcccctggatggtcccagactctcaggacatgcccagctcaggggcttcgagccacaggcctggcctcatatggcatgagggggagctggcataggagccccctccctgctgtggtcctgccctctgtcctgcagactgctcttagccccctggctttgtgccaggcctggagagggcagtcccccatggggtgccgagccaacgcctcaggaatcaggaggccagcctggtaccaaaaggagtacccagggcctggtacccaggcccactccagaatggccttggactcaccttgaaagggggagctgctgggcctaaagcccactcctgggggtctcctgctgcttaggtccttttgggacccccacccatccaggcccttttttgcacacttttcccccaccttatgcatttccccccactgcggtgttcggcctaaggtggtgggggtgagggggggtttggccattagcatttcatgtctttccccaaatgaaatgccctgcaaagggcagtaacccc

SEQ ID NO: 545 - DNA, 60 bp, Homo sapiens
tggccattagcatttcatgtctttccccaaatgaaatgccctgcaaagggcagtaacccc

SEQ ID NO: 546 - DNA, 2189 bp, Homo sapiens
  misc_feature 1177, 1212, 1213, 1214: n = A,T,C or G
aaatacctgggataacggcggcgagcggacggctgcatttacggggtctcccggagggccagagtcgtggcttacagaagagacgaaatgtggtctgagggacgatatgaatatgaaagaattccgagagaacgagcacctcctcgaagtcatcccagtgatggctacaatagactagttaatattgtgccaaagaaaccaccactgctagacagacctggtgaaggaagctacaatagatattacagtcatgttgattaccgagactatgacgagggccgcagtttttctcatgatcgaagaagtggtccacctcacagaggagatgaatctggttatagatggacaagagacgatcattctgcaagcaggcaacctgaatacagggacatgagagatggctttagaagaaaaagtttctactcttcccattatgcgagagagcggtctccttataaaagggacaatacttttttcagagaatcacctgttggccgaaaggattctccacacagcagatctggttccagtgtcagtagcagaagctactctccagaaaggagcaaatcatactctttccatcagtctcaacatagaaagtccgtgcgtcctggtgcctcctacaaacggcagaatgaaggaaatcctgaaagagataaagagaggcctgtccagtctttgaaaacatcaagagatacttcaccctcaagtggttcagcagtttcttcatcaaaggtgttagacaaacccagtaggctaactgaaaaggaacttgctgaggctgcaagcaagtgggctgctgaaaagctagagaaatcagatgaaagtaacttgcctgaaatttctgagtatgaggcgggatccacagcaccattgtttactgaccagccagaggaacctgagtcaaacacaacacatgggatagaattatttgaagatagtcagctaaccactcgctctaaagcaatagcatcaaaaaccaaagagattgaacaggtttaccgacaagactgtgaaactttcgggatggtggtgaaaatgctgattgaaaaagatccttcattagaaaagtctatacagtttgcattgaggcagaatttacatgaaatagagtctgcaggacagacttggcagcaggtaccccctgtgaggaacactgaaatggatcacgacggancccccgaaaacgaaggcgaagagactgcgcagtcnnncccgcagcccccgcaggccccgcagcccctgcagccccggaagaaacgggttcgtcggacgacacagcttcgtcggacgacaggagccccagacattacctgggggatgctgaagaagacaactcaggaggctgagaggatcctgctccgaacacagacaccattcactccagaaaatttgttccttgctatgctctctgttgtacattgcaactcacgcaaggatgtaaagccagaaaacaagcagtaactgctatgcctgacaaaactgttgctgcacacatctgtactcgtcaatcaacaaaacctgatgcaaaaaacagaaaaggggtgatgtaggagatggtcaggttggtaggagaagctataaggaaagacgcaattggaaggtcgggaggttttccaaagcttcaggagagaataaagctgaaggcagctttattaattaattctcttaccctgaggctgagggcgaacagtaggtagcaagggagtgtaaaggaatttatctagataagtttgtttacttatgccctccggaaatcatgcaagactgctccctgcaaaggggggcgacaatgttcattactcacaaattgtgttggcttcaggcctttggtattctgtctctactgaataaatacaaatggttccagcctatcaggactgcactctcttctcggctgcactaaagctggcactcccccagccgttctcatgcaaaatacctgtgtcagaatactcctttcatccatcactcagccagagtcttcaggacagactccgcatgggacttgtccaaaaaaattctaatcaaaagaggaaaattttggaatatgccaggaatagtggaattttattttttaaatttttttataggcccatatgctctatctcaagaaacaagatgattgtaacatgtccatgattaaactattggcagattattgctgtgttaaaaaaaaaaaaaaaaaa

SEQ ID NO: 547 - DNA, 60 bp, Homo sapiens
gccttggttatcaacaggtggaatgtagatattgtaaagctttttgtgaattaaaagtgc

SEQ ID NO: 548 - DNA, 2104 bp, Homo sapiens
ctctgccgagcctccttaaaactctgccgttaaaatgggggcgggtttttcaactcaaaaagcgctcaatttttttcttttcaaaaaaagctgatgaggtcggaaaaaagggagaagaaaccggcaccctctctgagaggcaacagaagcagcaattgtttcagcgaaaaaagcagcaagggagggagtgaaggaaaaaagcaaaaaagggggcgacacgcaagtgcctgtaggggtgaaaggagcagggaccggcgatctagggggggatcagctacaaaagaaactgtcactgggagcggtgcggccaaggaggaagcagtgctgccaggctctgctccagggcacagctggctggcggctgccctgtccgcagcaaaggggcacaggccggggaccgcgagaggtggcaaagtggcaccgggcgccgaggctgctgagcgctcgccgagacggcgaccggactggctgccccggaactgcggcgactctccctactcagaacttggcctacgtttcccaggactctccccatctccagaggcccccacaaaaccgggaaaggaaggaaaggacagcggcggcagcagctcaatgagtgcctacagcagaaagcctgaacgagctcggtcgtaggcgggaagttcccgggggggctgcccagtgcagccgcaatgctgccgcgagctgccccagcagtccgggctccgtagacgctttccgcatcactctccttcctcgggctgccgggagtcccgggacctggcggggccggcatgacgggcttctcgggggcccgccgcacgcccggcagcctccggagacgcgcgccgagcccggctcccacggcctctgaggctcggcggggctgcggctgcctggcgggcgggctccggagctttcctgagcggcattagcccacggcttggcccggacgcgaccaaaggctcttctggagaagcccagagcactgggcaatcgttacgacctgtaacttgagggccaccgaactgctactcccgttcgcctttggcgatcatcttttaaccctccggagcacgtcagcatccagccaccgcggcgctctcccagcagcggaggacccaggactatcccttcggcgagacggatggaaaccgagccccctggaggacctgcccctgcagttctgcctcacacggctcaagtcaccaccgtgaacaagggaccctaaagaatggccgagccttgggggaacgagttggcgtccgcagctgccaggggggacctagagcaacttactagtttgttgcaaaataatgtaaacgtcaatgcacaaaatggatttggaaggactgcgctgcaggttatgaaacttggaaatcccgagattgccaggagactgctacttagaggtgctaatcccgatttgaaagaccgaactggtttcgctgtcattcatgatgcggccagagcaggtttcctggacactttacagactttgctggagtttcaagctgatgttaacatcgaggataatgaagggaacctgcccttgcacttggctgccaaagaaggccacctccgggtggtggagttcctggtgaagcacacggccagcaatgtggggcatcggaaccataagggggacaccgcctgtgatttggccaggctctatgggaggaatgaggttgttagcctgatgcaggcaaacggggctgggggagccacaaatcttcaataaacgtggggagggctcccccacgttgcctctactttatcaattaactgagtagctctcctgacttttaatgtcatttgttaaaatacagttctgtcatatgttaagcagctaaattttctgaaactgcataagtgaaaatcttacaacaggcttatgaatatatttaagcaacatctttttaacctgcaaaatctgttctaacatgtaattgcagataactttgactttcttctgaatattttatctttccttggcttttcccttgcttccccttttgccaatctcaacacccaagttgaagactttgtttttaaaatggtttgtcctgatgcttttgtctaattaaaacactttcaaaacaggaaaaaaaaaaaaaaaaaa

SEQ ID NO: 549 - DNA, 60 bp, Homo sapiens
cccttgcttccccttttgccaatctcaacacccaagttgaagactttgtttttaaaatgg

SEQ ID NO: 550 - DNA, 947 bp, Homo sapiens
gccggtggcacgacagttgctgcagggaatcttttaaacgagagcgagaaggactgcgggcaggaccggcgggctcctggggttcagccgtgccgcctcgttacgatgaccagtgtggttaagacagtgtatagcctgcagcccccctctgcgctgagcggcggccagccggcagacacacaaactcgggccacttctaagagtctcttacctgttaggtccaaagaagtcgatgtttccaaacagcttcattcaggaggtccagagaatgatgttacaaaaatcaccaaactgagacgagagaatgggcaaatgaaagctactgacactgccaccagaaggaatgtcagaaaaggctacaaaccactgagtaagcaaaaatcagaggaagagctcaaggacaagaaccagctgttagaagccgtcaacaagcagttgcaccagaagttgactgaaactcagggagagctgaaggacctgacccagaaggtagagctgctggagaagtttcgggacaactgtttggcaattttggagagcaagggccttgatccagctttaggcagtgagaccctgtcatcacgacaagaatccactactgatcacatggactctatgttgctgttagaaactttgcaagaggagctgaagctttttaacgaaacagccaaaaagcagatggaggagttacaggccttaaaggtaaagctggagatgaaagaggaaagagtccgattcctagaacagcaaaccttatgtaacaatcaagtaaatgatttaacaacagcccttaaggaaatggagcagctattagaaatgtaagaagaagcaagtggccagatggctccctcttgggcataaaatctcagaggaggctacttaggacatcatcttggccatgatcttctgggactcaccatctccagaatgaaaacaatttctacagt

SEQ ID NO: 551 - DNA, 60 bp, Homo sapiens
agtccgattcctagaacagcaaaccttatgtaacaatcaagtaaatgatttaacaacagc

SEQ ID NO: 552 - DNA, 2232 bp, Homo sapiens
atctaatgaggagcgaggtgcggtgccccgaagcgctcgcttcccgcggtgcgatctagtcctgcagtaggcggcccggggccacaccgcggccgcccaagccagtgcaaggcccaggggcctgacatcgctcccagcgctcgaggaccgaggcctgctgtggaggacaccgtgctccctcgggacctgctctggattccggcccggacgtccccttggagctctgcatctccaacctggaacccaacccagaagtctcaagtttgacgcatcacgtggcgtgcggatccactgagggtccacagagaggggcgcccatctcctgcgtctcagttatcctggtgttgggaattctgtgccctaaagaattccgactcagatccgaacggggatctggtggaatcgagggtgaaagaccagagggacaatgttctactatcccaacgtgcttcagcgccacaccggctgctttgccaccatctggctggcggcgactcgcggcagccggttggtgaagcgcgaatacctgagggtgaatgtggtgaaaacctgcgaggaaatcctcaattacgtgctggtacgagtgcaacccccgcagcccggcctgccgcggccccgcttctccctctatctctcagcccaacttcagatcggtgtgatccgcgtctattctcaacaatgccagtacctcgcggaggacatccagcacatcttggagcgcctccaccgtgcccagctgcagatccgaatagatatggagactgagctacccagcctgctgcttcctaaccacctggccatgatggagaccctagaagatgctccagatcccttttttgggatgatgtctgtggatcccagacttcctagtcctttcgatatccctcagattcgacacctcttagaggctgcaatcccagagagagttgaagagatccctcctgaagttcctacagagcccagggagccagagaggattccggtcactgtgctgccacctgaggccatcacgatcctggaggcagagcccatacggatgctggagattgagggtgaacgggagctcccagaggtcagccgccgagaactggacctgctgatcgcagaggaagaagaagctatcttgttagaaatcccgcggctcccacctccagctcctgcagaggtggaaggaataggagaggcactgggtcctgaggagctgaggctgacaggctgggaacctggggccctactcatggaggtgacccccccggaggagctgcgtctgccagccccacccagcccagagaggaggcccccagtccccccacctcctcgccgccgccgtcgtcgccggttactgttctgggacaaggagactcagatctccccggagaaattccaggaacaactgcaaaccagagcccactgctgggaatgtcctatggtgcagccgcccgagaggaccatcagaggccctgcggagttgttcagaaccccaactctctctggctggctaccccctgaactactgggtctctggacccattgtgcccagccacccccaaaagccctcaggcgagagctgcctgaggaggcagccgctgaggaggaaaggagaaagattgaagttccaagtgagattgaggtcccgagggaggccctggagcccagtgttccccttatggtgtctttagagatctccctagaggcagctgaagaggagaagtcccgcatcagcctcatcccaccagaagaacggtgggcctggcctgaggtggaggcgccagaagctcctgcattgcccgtggtgcctgaactccctgaggtgcccatggagatgcctttggtgctgcccccagagctcgagctgctctcactggaagcagtgcacagggcagtggcactggagctgcaggctaacagggagcccgacttcagcagcctggtgtcacctctcagcccccgcaggatggctgcccgggtcttctacctgctcctggtgctctcagcgcaacagattcttcacgtgaaacaagaaaagccatatggtcgcctcctgatccagccggggcccagattccactgaggttagagtccatttacaaagctgccaggaaaccggccacttctagtaaaccacgtcgtgcctcactgggtcctgcttacctcatttctgaatgtgcatttccagccttcttgctctcagagctattgttcaagcagaaaacaagctgcttttattacagt

SEQ ID NO: 553 - DNA, 60 bp, Homo sapiens
tctgaatgtgcatttccagccttcttgctctcagagctattgttcaagcagaaaacaagc

SEQ ID NO: 554 - DNA, 2818 bp, Homo sapiens
ccctactccgcctctcgggatcctttaagaggcggggcttggctgccagctccgcggcccgggcaaaaggctgggactttactccgggtggcggcgaggacgagtctgtgctccatcagctgccgcacccgccgcctcccgcccccaaaccccatccccgcggttgagccacgatgagcggcagagtcggcgatctgagccccaggcagaaggaggcattggccaagtttcgggagaatgtccaggatgtgctgccggccctgccgaatccagatgactattttctcctgcgttggctccgagccagaagcttcgacctgcagaagtcggaggccatgctccggaagcatgtggagttccgaaagcaaaaggacattgacaacatcattagctggcagcctccagaggtgatccaacagtatctgtcagggggtatgtgtggctatgacctggatggctgcccagtctggtacgacataattggacctctggatgccaagggtctgctgttctcagcctccaaacaggacctgctgaggaccaagatgcgggagtgtgagctgcttctgcaagagtgtgcccaccagaccacaaagttggggaggaaggtggagaccatcaccataatttatgactgcgaggggcttggcctcaagcatctctggaagcctgctgtggaggcctatggagagtttctctgcatgtttgaggaaaattatcccgaaacactgaagcgtctttttgttgttaaagcccccaaactgtttcctgtggcctataacctcatcaaacccttcctgagtgaggacactcgtaagaagatcatggtcctgggagcaaattggaaggaggttttactgaaacatatcagccctgaccaggtgcctgtggagtatgggggcaccatgactgaccctgatggaaaccccaagtgcaaatccaagatcaactacgggggtgacatccccaggaagtattatgtgcgagaccaggtgaaacagcagtatgaacacagcgtgcagatttcccgtggctcctcccaccaagtggagtatgagatcctcttccctggctgtgtcctcaggtggcagtttatgtcagatggagcggatgttggttttgggattttcctgaagaccaagatgggagagaggcagcgggcaggggagatgacagaggtgctgcccaaccagaggtacaactcccacctggtccctgaagatgggaccctcacctgcagtgatcctggcatctatgtcctgcggtttgacaacacctacagcttcattcatgccaagaaggtcaatttcactgtggaggtcctgcttccagacaaagcctcagaagagaagatgaaacagctgggggcaggcaccccgaaataacaccttctcctatagcaggcctggccccctcagtgtctccctgtcaatttctaccccttgtagcagtcattttcgcacaaccctgaagcccaaagaaactgggctggaggacagacctcaggagctttcatttcagttaggcagaggaagagcgactgcagtgggtctccgtgtctatcaaatacctaaggagtccccaggagctggctggccatcgtgataggatctgtctgtcctgtaaactgtgccaacttcacctgtccagggacagcgaagctgggggtggcggggggcatgtaccacagggtggcagcagggaaaaaaattagaaaagggtgaaagattgggacttaacacttcagggaagtcagctgccggggagaaacttgctcctaaatgaacacataagtttagatcgcaatgaggagtagcagggtagctggttgctagagttacggtggggatcagaaactcttccaaacattttagcactgaggctggggtagcttttggcttttcccaggtctcaggaggtggcctgagtcagcacacatcttcccactcggtagacaggctggcctctccctcactttgagactttggcaactcctgggccacacggcctgcctctttgattactaatgattgtcagtgactcagagcttcctgggacttcgggtacccacccgctgttctccatgcaaacaaagcgccagggaaatgacccacagggatcgcagctgcagggagggccagggaggttgggggtgggagtgaatgctaaaagcagatcgtccagtgcccttttcagtgctaccggcctctcaccaagcagtcctccatgtgagcaaccccgagacaaaaatgctaagtgggatcaagagagcagcactcggagagggtgtttgccagtctgagtgtcccgcggtgcccgccaacccgcttcctgactgacctgagcaaggtcttactaagcagtcccatctctgtgggaggcatgcaacgcgtgcagggagttcaggtgccggtcggcgtagccaggcctggaggccccccaggcaggaggccgcccaaaggcggggccggcgtctcgcagactaggggctgggggcggccacagacggcctcgaaaccacagcccttaccccaatcccacgagccccgccaacgaaccacaggtgctgggctttagagaacatgggaaggcggccccagacctggcgggaacgcctttccctcagagccaggccccggccccgtctgggaagctcatcttgcgaagctgagggagctcagggcaaaggccaggctagcgcggaccggaaggggccgaggctgcacgggcctctgccagaacgctcaggacatcccggcctgggtttacaacgctgttaggaaaattaaccaatgaataaagcaacgttcagtgcgca

SEQ ID NO: 555 - DNA, 60 bp, Homo sapiens
cctgggtttacaacgctgttaggaaaattaaccaatgaataaagcaacgttcagtgcgca

SEQ ID NO: 556 - DNA, 1618 bp, Homo sapiens
ggctccttccccttcccgggcctttcagcttggtctttccgggcctcgcttcccccagcccctgcgcccggcccgaacgagaggttccggagccccggcgcgggcgggttctggggtgtagacgctgctggccagccctccccagccgaggttctcggcaccgccttgagagcttcagctgccccaggattagaatcccaagaaaatcaaatggcatccggggatttctgctcacctggagaagggatggaaatacttcaacaagtgtgcagcaaacaacttcctccttgtaacctgagtaaagaggacctgttacagaacccatacttcagcaagcttctcctgaatctctcacagcatgtggatgagagtggcttaagcctcaccctagcaaaggagcaggctcaggcatggaaggaagttcgactgcataagacaacatggttgaggtctgagattttacacagagtcattcaagagttgcttgtggactactatgtgaagatacaagacacaaatgtaacttctgaggacaaaaagtttcatgagacccttgaacagcggctgcttgtaactgaactgatgcggctcttaggtcctagccaggagagggagatacctccactgctggggctggagaaagcggaccttctggaactcatgccactcacagaggattttgtgtggatgagggctcggctacagcaagaagtagaggagcagctcaaaaagaaatgtttcactctgctctgctactatgatcccaattcagatgctgacagtgaaaccgtgaaggcagcaaaggtgtggaaactcgcagaggtcctggtgggtgagcagcagcagtgccaggatgccaagagccagcagaaggagcagatgttgctgctggagaagaagagtgctgcttactcccaggtgcttctccgctgcctcactttgctgcagaggcttcttcaagaacaccggctgaagactcaatccgagctagaccgcatcaatgcccagtacctggaagtcaagtgcggtgctatgatccttaagctgaggatggaggagctaaagattttgtccgacacttacactgttgagaaagtggaagttcatcgtctgattagggaccgtttggagggagccattcacctacaggagcaggacatggagaactcaagacaggtcctgaactcctatgaggtccttggggaggagtttgacaggctggtgaaagagtacaccgtactcaagcaggcaacagagaacaagcggtgggccctccaggagttcagcaaggtctaccgttgagctctggcagggccaggagacatggcttctgcatagctgctgcctcctaatcttcctgctagtgggaccaccttcacctggggctgccttcagtgcaagggagtgtggaaatgcttacgcttgaaacactgcagtcatttaggcactctcctggtttctctttattttttatgactgggcctcttctggaaaatctagcaaggagatttatataatttttatgcatagctgtgtgtcagtgtcagccctgtattgtatttgattatctcctgaataaagttatgatattatatcttaaaaaaaaaaaaaaaaaaaa

SEQ ID NO: 557 - DNA, 60 bp, Homo sapiens
ttttgtccgacacttacactgttgagaaagtggaagttcatcgtctgattagggaccgtt

SEQ ID NO: 558 - DNA, 1432 bp, Homo sapiens
gctgttcggcctgcgtcgctccgggagctgccgacggacggagcgcccccgcccccgcccggccgcccgcccgccgccgccatgcccttctccaacagccacaacgcactgaagctgcgcttcccggccgaggacgagttccccgacctgagcgcccacaacaaccacatggccaaggtgctgacccccgagctgtacgcggagctgcgcgccaagagcacgccgagcggcttcacgctggacgacgtcatccagacaggcgtggacaacccgggccacccgtacatcatgaccgtgggctgcgtggcgggcgacgaggagtcctacgaagtgttcaaggatctcttcgaccccatcatcgaggaccggcacggcggctacaagcccagcgatgagcacaagaccgacctcaaccccgacaacctgcagggcggcgacgacctggaccccaactacgtgctgagctcgcgggtgcgcacgggccgcagcatccgtggcttctgcctccccccgcactgcagccgcggggagcgccgcgccatcgagaagctcgcggtggaagccctgtccagcctggacggcgacctggcgggccgatactacgcgctcaagagcatgacggaggcggagcagcagcagctcatcgacgaccacttcctcttcgacaagcccgtgtcgcccctgctgctggcctcgggcatggcccgcgactggcccgacgcccgcggtatctggcacaatgacaataagaccttcctggtgtgggtcaacgaggaggaccacctgcgggtcatctccatgcagaaggggggcaacatgaaggaggtgttcacccgcttctgcaccggcctcacccagattgaaactctcttcaagtctaaggactatgagttcatgtggaaccctcacctgggctacatcctcacctgcccatccaacctgggcaccgggctgcgggcaggtgtgcatatcaagctgcccaacctgggcaagcatgagaagttctcggaggtgcttaagcggctgcgacttcagaagcgaggcacaggcggtgtggacacggctgcggtgggcggggtcttcgacgtctccaacgctgaccgcctgggcttctcagaggtggagctggtgcagatggtggtggacggagtgaagctgctcatcgagatggagcagcggctggagcagggccaggccatcgacgacctcatgcctgcccagaaatgaagcccggcccacacccgacaccagccctgctgcttcctaacttattgcctgggcagtgcccaccatgcacccctgatgttcgccgtctggcgagcccttagccttgctgtagagacttccgtcacccttggtagagtttatttttttgatggctaagatactgctgatgctgaaataaactagggttttggcctgcctgcgtctg

SEQ ID NO: 559 - DNA, 60 bp, Homo sapiens
tcacccagattgaaactctcttcaagtctaaggactatgagttcatgtggaaccctcacc

SEQ ID NO: 560 - DNA, 1327 bp, Homo sapiens
cacaacggccatcaccacctctccgcaccctctgtctccttccttctcgggcctcacccctggccctcgctttcagtgcccagcccggaccgcagcactccagttccgccccaacccgggaaccctggactgaggctcccgtttctgtcctttctattgggcgcacttccgatggcgtcaggaatttcagccaataggagccagccaggaagtacctctctgagcggttggtgccgggtataaaagaaggccagcacggctgctcacgacgccgcgaagcctgtgtagcactgagacatcagtgagttggctacagcagaccaaacagcccagcagcccagcagcccacgcatgcggcgcctcacagtcgatgactttgaaatcgggcgtcccctgggcaaggggaaatttgggaatgtgtacctggctcggctcaaggaaagccatttcattgtggccctgaaggttctcttcaagtcgcagatagagaaggaaggactggagcaccagctgcgccgggaaattgagatccaggctcatctacaacaccccaatatcctgcgcctgtataactatttccatgatgcacgccgggtgtacctgattctggaatatgctccaaggggtgagctctacaaggagctgcagaaaagcgagaaattagatgaacagcgcacagccacgataatagaggaagttgcagatgccctgacctactgccatgacaagaaagtgattcacagagatattaagccagagaacctgctgctggggttcaggggtgaggtgaagattgcagattttggctggtctgtgcacacccccctccctgagaggaagacaatgtgtgggacactggactacttgccgccagaaatgattgaggggagaacatatgatgaaaaggtggatttgtggtgcattggagtgctctgctatgagctgctggtgggatatccaccctttgagagcgcctcccacagtgagacttacagacgcatcctcaaggtagatgtgaggtttccactatcaatgcctctgggggcccgggacttgatttccaggcttctcagataccagcccttggagagactgcccctggcccagatcctgaagcacccctgggttcaggcccactcccgaagggtgctgcctccctgtgctcagatggcttcctgagccctgtctgcctctgttccctttgtgtgtgttcagggagctctcctgctctgccacctcatttgtctttatttttttctcttttaagatgtaagatgctaattaataaaagctgaatcatttcataccaaaaaaaaaaaaaaaaaaa

SEQ ID NO: 561 - DNA, 60 bp, Homo sapiens
aaatgattgaggggagaacatatgatgaaaaggtggatttgtggtgcattggagtgctct

SEQ ID NO: 562 - DNA, 901 bp, Homo sapiens
gggatctcggactccctggaccctccctccagcccagcctcgctagctccgcctgcggtacgtgctcccgcctccgactcaaaatgcctgtctggggaggtggaaacaagtgtggggcctgtgggaggaccgtgtaccacgcagaagaggtgcagtgtgatggcaggagcttccaccgctgctgctttctctgcatggtttgcaggaaaaatttagatagcacaacagtggcaattcacgatgaagagatctactgcaaatcctgctacggaaagaagtatgggccaaaaggctacggttatggccagggcgctggcacgcttaacatggaccgtggcgagaggctgggcatcaaaccagagagtgttcagcctcacaggcctacaacaaatccaaacacttctaaatttgctcagaaatatggaggtgctgagaagtgttccagatgtggggattctgtatatgctgccgagaagataattggagctggaaagccctggcacaaaaactgtttccgatgtgcaaagtgtgggaagagtcttgaatcaacaactctgactgaaaaagaaggtgaaatctattgtaaaggatgctatgcaaagaactttgggcccaagggatttggctatggccaaggagcaggggctcttgttcatgcccagtaagatgtaaaccctgaactaaacatcacacactgagaatctcttcataatctaggcacagataatctttaacactaaactactgtgaaattctaccagcattaagtactgtatatcgccctgtacttggataggctggctaactcgtaggaagagagcactgtatggtatccttttgctttattcaccagcattttgggggaacatttcttttacattttaaataaaacttcagcttg

SEQ ID NO: 563 - DNA, 60 bp, Homo sapiens
caactctgactgaaaaagaaggtgaaatctattgtaaaggatgctatgcaaagaactttg

SEQ ID NO: 564 - DNA, 4532 bp, Homo sapiens
gaacgaagaaggcgtcccggcatcggccaagattctacattgctcatctgggcatctgagcctccttcgaagtttcctgtcacaactgtcctcttgacagcatggatgaggaggaagacaatctgtctctgctgaccgcactgctggaagaaaatgagtcagccttggattgtaattcagaagaaaataacttcttgacgcgggaaaatggcgagcccgacgcatttgatgagctctttgatgccgacggcgacggtgaatcttatacagaagaggctgatgatggagaaacaggagagacaagagacgaaaaggaaaatctggccactctctttggagatatggaggacttaacagatgaagaagaagttcccgcatcacagtcaactgaaaatagggtcctccctgctcctgcccccaggcgagagaaaacgaatgaagagttgcaagaggaattaaggaatttgcaagagcaaatgaaggccttacaagagcagctaaaagtaacaacaattaaacagacagcaagcccagcccgtctgcaaaaatcccctgagaagtctccccggccacctcttaaggagaggagagttcagagaattcaggagtcaacatgcttttctgcggagcttgatgtccctgcgctaccaagaaccaagagggtggctcgaacaccaaaggcttcacctccagatcccaaaagctcatcttcaaggatgacaagtgcaccctcccaacccctacagacgatttctcggaacaaacctagtgggataactagaggtcaaattgtggggaccccaggaagttctggggaaacgactcaacccatctgtgtggaagccttctctggtctgcggctcaggcggcctcgagtatcctccacagaaatgaacaagaaaatgaccggccgaaaactgatcagactgtctcagatcaaggaaaagatggccagagagaagctggaagaaatagattgggtgacatttggggttatattgaagaaggttacgccacagagtgtgaatagtggaaaaaccttcagcatatggaaactgaatgatcttcgtgacctgacacaatgtgtgtccttgttcttatttggagaagttcacaaagcgctctggaagacggagcaggggactgtcgtagggatcctcaatgccaaccccatgaagcccaaggatggttcagaggaggtgtgtttatctatcgatcatcctcagaaggtcttaattatgggtgaagctcttgacctgggaacctgtaaagccaagaagaagaatggagagccgtgcacgcagactgtgaatttgcgtgactgtgagtactgtcagtaccatgtccaggctcagtacaagaagctcagcgcaaagcgtgcggatctgcagtccaccttctctggaggacgaattccaaagaagtttgcccgcagaggcaccagcctcaaagaacggctgtgccaagatggcttttactacggaggggtttcttctgcctcgtatgcagcttcaattgcagcagctgtggctcctaagaagaagattcaaaccactctgagtaatctggttgttaagggcacaaacttgatcatccaggaaacacggcaaaaactcggaataccccagaagagcctgtcttgctctgaggagttcaaggaactgatggacctgccgacgtgtggagccaggaacttaaaacaacatttagccaaagccacagcttcagggattatggggagcccaaaaccagccatcaagtccatctcggcctcagcactcttgaagcaacagaagcagcggatgttggagatgaggagaaggaaatcagaagaaatacagaagcgatttctgcagagctcaagtgaagttgagagcccagctgtgccatcttcatcaagacagccccctgctcagcctccacggacaggatccgagttccccaggctggagggagccccggccacaatgacgcccaagctggggcgaggtgtcttggaaggagatgatgttctcttttatgatgagtcaccaccaccaagaccaaaactgagtgctttagcagaagccaaaaagttagctgctatcaccaaattaagggcaaaaggccaggttcttacaaaaacaaacccaaacagcattaagaagaaacaaaaggaccctcaggacatcctggaggtgaaggaacgtgtagaaaaaaacaccatgttttcttctcaagctgaggatgaattggagcctgccaggaaaaaaaggagagaacaacttgcctatctggaatctgaggaatttcagaaaatcctaaaagcaaaatcaaaacacacaggcatcctgaaagaggccgaggctgagatgcaggagcgctactttgagccactggtgaaaaaagaacaaatggaagaaaagatgagaaacatcagagaagtgaagtgccgtgtcgtgacatgcaagacgtgcgcctatacccacttcaagctgctggagacctgcgtcagtgagcagcatgaataccactggcatgatggtgtgaagaggtttttcaaatgtccctgtggaaacagaagcatctccttggacagactcccgaacaagcactgcagtaactgtggcctctacaaatgggaacgggacggaatgctaaaggaaaagactggtccaaagataggaggagaaactctgttaccaagaggagaagaacatgctaaatttctgaacagccttaaataacccgaacttcagacattttcccacagacttcctggcctcctgtgactctggaaagcaaaggattggctgtgtattgtccattgattcctgattgacgccgtcaaaaacaaatgcttgttaagcccataagctttgcctgcttactttctgccattgggttggtttgataccacatttaacattgacatttaagtggaaaaccaagttatcattgtcttttctaagctcagtgtggatgattgcattacttcattcactgaagtttttgcccaaaaattggaaggtaaacagagagctatgtttctgtatcttttggttatagagtgttcacttctttatcataacaaaattctagtgtttatacgaacacccagaggcaaaagaatttggcttaattctcactccaggtaagtagcttaacttctgggcttcagttttctcatctgtaaaatcaggaagattggactaagtgatcctgaaatgtattttttagcactggatttctacaaataataaaactttcccatctagataatgatgatcacatagtcttgatgtacggacattaaaagccagatttcttcattcaattctgttatctctgttttactctttgaaattgatcaagccactgaatcactttgcatttcagtttatatatatagagagaaagaaggtgtctgctcttacattattgtggagccctgtgatagaaatatgtaaaatctcatattattttttttttaatttttttattttttatgacagggtctcactatgtcaccctggctggagtgcagtagtgcgatcgcggcacactgcagccttggcttccctgggctcaagcagtcctcccacctcagtctcccaaatagctaggactacaggcgtgcgtgaccaagcccagctaatttttgcattttttgtagagatggggttttgccatgttgctcaggctggtctcaaactcctgagcactagcaatccacccacctctgtttccaaaaaaaaaaaaaaaatgaaaggtcaacccctatgcaaattaccacagcaaaggtttcattcaggagattcttccatctgggcaacctggttttccaaatatcatttgacctaagtgaatgttgatactagctaaagattgggtaaattggttgaattattgtattgaagcttgagctgtagctaaaagtaatttaggtttcccctaagatgttattatgttagggacataacacttttgggaggttgttgtgggagatggttgatttaggttttcaaaagctagaaataaaatttacatgccttagatttcataaaattctgctctaattgggtggaaggtgctgtatctaacttgtgttcctcctaaggttatgtcctaataactattcttttaggagtatacttctactttatagaaggttgcttttctttttaattttttctaacaaagaaaagaataaagtatttattaataagaaccagaaagcacttgaaactgatgtttttaatggctcatttagggtagatttatttatctcattaacttaaaacagctatgtgtatgaaataggtcacaacagaacttgaacaccaggttggtgtctgagcaatccctttcttatgggaaaaacaatgttcttgtttgaacagagggtatcattgcagtcagtattcacgtgtatattgttatataagttgtataatatgcttgtaaaggctgagggtgagctgtatctggatgcctttttacaatttgattttaacttttaaaataaatttaaaacataaaaaaaaaaaaaa

SEQ ID NO: 565 - DNA, 60 bp, Homo sapiens
atagagtgttcacttctttatcataacaaaattctagtgtttatacgaacacccagaggc

SEQ ID NO: 566 - DNA, 787 bp, Homo sapiens
ctgaaggtcacccgggcggccccctcactgaccctccaaacgcccctgtcctcgccctgcctcctgccattcccggcctgagtctcagcatggcggatgggagcagcgatgcggctagggaacctcgccctgcaccagccccaatcagacgccgctcctccaactaccgcgcttatgccacggagccgcacgccaagaaaaaatctaagatctccgcctcgagaaaattgcagctgaagactctgctgctgcagattgcaaagcaagagctggagcgagaggcggaggagcggcgcggagagaaggggcgcgctctgagcacccgctgccagccgctggagttgaccgggctgggcttcgcggagctgcaggacttgtgccgacagctccacgcccgtgtggacaaggtggatgaagagagatacgacatagaggcaaaagtcaccaagaacatcacggagattgcagatctgactcagaagatctttgaccttcgaggcaagtttaagcggcccaccctgcggagagtgaggatctctgcagatgccatgatgcaggcgctgctgggggcccgggctaaggagtccctggacctgcgggcccacctcaagcaggtgaagaaggaggacaccgagaaggaaaaccgggaggtgggagactggcggaagaacatcgatgcactgagtggaatggagggccgcaagaaaaagtttgagagctgagccttcctgcctactgcccctgccctgaggagggccactgaggaataaagcttctctctgagctg

SEQ ID NO: 567 - DNA, 60 bp, Homo sapiens
tgtggacaaggtggatgaagagagatacgacatagaggcaaaagtcaccaagaacatcac

SEQ ID NO: 568 - DNA, 2268 bp, Homo sapiens
  misc_feature 13: n = A,T,C or G
gggatttgaaccncgctgacgaagtttggtgatccatcttccgagtatcgccgggatttcgaatcgcgatgatcatcccctctctagaggagctggactccctcaagtacagtgacctgcagaacttagccaagagtctgggtctccgggccaacctgagggcaaccaagttgttaaaagccttgaaaggctacattaaacatgaggcaagaaaaggaaatgagaatcaggatgaaagtcaaacttctgcatcctcttgtgatgagactgagatacagatcagcaaccaggaagaagctgagagacagccacttggccatgtcaccaaaacaaggagaaggtgcaagactgtccgtgtggaccctgactcacagcagaatcattcagagataaaaataagtaatcccactgaattccagaatcatgaaaagcaggaaagccaggatctcagagctactgcaaaagttccttctccaccagacgagcaccaagaagctgagaatgctgtttcctcaggtaacagagattcaaaggtaccttcagaaggaaagaaatctctctacacagatgagtcatccaaacctggaaaaaataaaagaactgcaatcactactccaaactttaagaagcttcatgaagctcattttaaggaaatggagtccattgatcaatatattgagagaaaaagaaacattttgaagaacacaattccatgaatgaactgaagcagcagcccatcaataagggaggggtcaggactccagtacctccaagaggaagactctctgtggcttctactcccatcagccaacgacgctcgcaaggccggtcttgtggccctgcaagtcagagtaccttgggtctgaaggggtcactcaagcgctctgctatctctgcagctaaaacgggtgtcaggttttcagctgctactaaagataatgagcataagcgttcactgaccaagactccagccagaaagtctgcacatgtgaccgtgtctgggggcaccccaaaaggcgaggctgtgcttgggacacacaaattaaagaccatcacggggaattctgctgctgttattaccccattcaagttgacaactgaggcaacgcagactccagtctccaataagaaaccagtgtttgatcttaaagcaagtttgtctcgtcccctcaactatgaaccacacaaaggaaagctaaaaccatgggggcaatctaaagaaaataattatctaaatcaacatgtcaacagaattaacttctacaagaaaacttacaaacaaccccatctccagacaaaggaagagcaacggaagaaacgcgagcaagaacgaaaggagaagaaagcaaaggttttgggaatgcgaaggggcctcattttggctgaagattaataattttttaatatcttgtaaatattcctgtattctcaacttttttccttttgtaaatttttttttttttgctgtcatccccactttagtcacgagatctttttctgctaactgttcatagtctgtgtagtgtccatgggttcttcatgtgctatgatctctgaaaagacgttatcaccttaaagctcaaattctttgggatggtttttacttaagtccattaacaattcaggtttctaacgagacccatcctaaaattctgtttctagatttttaatgtcaagttcccaagttccccctgctggttctaatattaacagaactgcagtcttctgctagccaatagcatttacctgatggcagctagttatgcaagcttcaggagaatttgaacaataacaagaatagggtaagctgggatagaaaggccacctcttcactctctatagaatatagtaacctttatgaaacggggccatatagtttggttatgacatcaatattttacctaggtgaaattgtttaggcttatgtaccttcgttcaaatatcctcatgtaattgccatctgtcactcactatattcacaaaaataaaactctacaactcattctaacattgcttacttaaaagctacatagccctatcgaaatgcgaggattaatgctttaatgcttttagagacagggtctcactgtgttgcccaggctggtctcaaactccaccaaatgtacttcttattcattttatggaaaagactaggctttgcttagtatcatgtccatgtttccttcacctcagtggagcttctgagttttatactgctcaagatcgtcataaataaaattttttctcattgtcaaaaaaaaaaaaaaa

SEQ ID NO: 569 - DNA, 60 bp, Homo sapiens
acattgcttacttaaaagctacatagccctatcgaaatgcgaggattaatgctttaatgc

SEQ ID NO: 570 - DNA, 2462 bp, Homo sapiens
gcagggagagcgtgcccgggcacgacagcctggtgcacagccgagaaaacaacagcgcgtgcgcgtagcgacctctttgcgcctgcgccccccttgccagtctttcgccggcaaaaggaggacgtagaaaaggggacaccggaaactcactcttcacccggaaatggttattgaggaacatggcgttgctggtgcgagtccttaggaaccagactagcatttctcagtgggttccagtatgcagccgattgatacctgtgtctcctacccaaggacagggggacagggctctgtctcgcacttcccagtggccccagatgagccagtcccaagcatgtggtggatcagaacagattcctggaatagacatacagctgaataggaagtatcacaccacacgtaagctttctactaccaaagattccccacagcctgttgaggagaaggttggtgctttcacaaagataatagaagccatgggattcacgggacctttgaaatacagtaaatggaagattaagattgcggccctgcgcatgtatactagctgtgtggagaaaactgacttcgaggaattctttctaaggtgtcagatgcctgatacattcaattcatggtttcttataaccctactccacgtctggatgtgtctagtccgaatgaagcaggaaggccggagtgggaagtacatgtgtcgtatcatagttcattttatgtgggaggatgttcagcagcgcggcagagtcatgggggttaatccctatatcctgaagaagaacatgatcctcatgacaaatcatttctatgcagcgatcttgggatatgatgaggggatcctttcagatgatcatgggctggccgctgccctctggagaaccttcttcaaccggaaatgtgaagaccctcgacatcttgaattgctggtagagtatgtgaggaaacagatacagtacctggactccatgaacggggaggatctgcttctgacaggggaggtgagctggcgccctctagtggagaagaatcctcagagcatcctgaagccccattctccgacttacaacgacgagggactttgatgggctgggccctccgcacggcccgccagctggcttcgaggaacctccaggagagaagtgcctgttggtccaggaccctgcagaaagtggcctgaactgacctctgaacagcatctgtcaaatacctggccccatttgtgttgagtttcctcttagtgtgcccaggagtctgatctgctggggtacagggctgggagaacccctagctctcccggggtgtcctctcccttaggggaagccccgagtgagagtcccccagcacacactccccaaccccctccagcaactacatgtgactgatagcttttcccaaaggccaaggaagggatggtgtaggttcaaaagggaaaccccccagggcctgctgtggcctaggagcagattgtaatgctgccgagtccggtcggtgaccacgcgttgtccctcggctttcagccatggggttgagttggccattaaaagaaacagagacttctctctgccatggcccttctttattccagggacttagaaacttgcctgagatggtggacgcagtaatgagggcaccgcgcagctcagttagagacggagaaagggaagaggctgggatggtctctgctgctcttgcctctagttcatggagatgtgtctctgttcaggccaagatacagccagccaggcctgtcgtctgggacccaggaggcctctgatgaccaagggctttcacatcctaagtcatttggaaggaggccttgagaacaaagtcacctttgtcactcccagtgaactgaatgaggaacatgctgtctcctgtcttggcctcccctttcatgagatactgggggagaagagaacattcctcctggcttagttgtagcagacccagacctgtgcccagctttggtcccccttcccaacttctgaagcacgtgctgcagagccaccttggtctgagcacctgaggaccagcccctcctccctcagtgcgggtcatctcttgggggattttcttaaagtgaagaaagggggtggggaaccatattgcccctccctcccccatcaaacttccttcatttaacttgctataaaatgagtcatataaagaaactctatatgggtgaggtatatcccacttctgtgaaaacattacaaatcaaaccgcttctctcagtttatttaagatgcttttgttgcgagcggagctctagagtgaagcctcctgtgtgtgtgtgagataataacaccttgtaactcattacagctgggcactatttacataaaccagagctgagccaggcaggaatttgctgattaatttatttttaatggagtgaagtataccatgcaccaaaataaactttactgtgtgtacctaactgctcctggaaaaaaaaaaaaaaa

SEQ ID NO: 571 - DNA, 60 bp, Homo sapiens
cttgctataaaatgagtcatataaagaaactctatatgggtgaggtatatcccacttctg

SEQ ID NO: 572 - DNA, 2490 bp, Homo sapiens
gttcgtagttcggctctggggtcttttgtgtccgggtctggcttggctttgtgtccgcgagtttttgttccgctccgcagcgctcttcccgggcaggagccgtgaggctcggaggcggcagcgcggtccccggccaggagcaagcgcgccggcgtgagcggcggcggcaaaggctgtggggagggggcttcgcagatccccgagatgccggagttcctggaagacccctcggtcctgacaaaagacaagttgaagagtgagttggtcgccaacaatgtgacgctgccggccggggagcagcgcaaagacgtgtacgtccagctctacctgcagcacctcacggctcgcaaccggccgccgctccccgccggcaccaacagcaaggggcccccggacttctccagtgacgaagagcgcgagcccaccccggtcctcggctctggggccgccgccgcgggccggagccgagcagccgtcggcaggaaagccacaaaaaaaactgataaacccagacaagaagataaagatgatctagatgtaacagagctcactaatgaagatcttttggatcagcttgtgaaatacggagtgaatcctggtcctattgtgggaacaaccaggaagctatatgagaaaaagcttttgaaactgagggaacaaggaacagaatcaagatcttctactcctctgccaacaatttcttcttcagcagaaaatacaaggcagaatggaagtaatgattctgacagatacagtgacaatgaagaaggaaagaagaaagaacacaagaaagtgaagtccactagggatattgttcctttttctgaacttggaactactccctctggtggtggattttttcagggtatttcttttcctgaaatctccacccgtcctcctttgggcagtaccgaactacaggcagctaagaaagtacatacttctaagggagacctacctagggagcctcttgttgccacaaacttgcctggcaggggacagttgcagaagttagcctctgaaaggaatttgtttatttcatgcaagtctagccatgataggtgtttagagaaaagttcttcgtcatcttctcagcctgaacacagtgccatgttggtctctactgcagcttctccttcactgattaaagaaaccaccactggttactataaagacatagtagaaaatatttgcggtagagagaaaagtggaattcaaccattatgtcctgagaggtcccatatttcagatcaatcgcctctctccagtaaaaggaaagcactagaagagtctgagagctcacaactaatttctccgccacttgcccaggcaatcagagattatgtcaattctctgttggtccagggtggggtaggtagtttgcctggaacttctaactctatgcccccactggatgtagaaaacatacagaagagaattgatcagtctaagtttcaagaaactgaattcctgtctcctccaagaaaagtccctagactgagtgagaagtcagtggaggaaagggattcaggttcctttgtggcatttcagaacatacctggatccgaactgatgtcttcttttgccaaaactgttgtctctcattcactcactaccttaggtctagaagtggctaagcaatcacagcatgataaaatagatgcctcagaactatcttttcccttccatgaatctattttaaaagtaattgaagaagaatggcagcaagttgacaggcagctgccttcactggcatgcaaatatccagtttcttccagggaggcaacacagatattatcagttccaaaagtagatgatgaaatcctagggtttatttctgaagccactccactaggaggtattcaagcagcctccactgagtcttgcaatcagcagttggacttagcactctgtagagcatatgaagctgcagcatcagcattgcagattgcaactcacactgcctttgtagctaaggctatgcaggcagacattagtcaagctgcacagattcttagctcagatcctagtcgtacccaccaagcgcttgggattctgagcaaaacatatgatgcagcctcatatatttgtgaagctgcatttgatgaagtgaagatggctgcccataccatgggaaatgccactgtaggtcgtcgatacctctggctgaaggattgcaaaattaatttagcttctaagaataagctggcttccactccctttaaaggtggaacattatttggaggagaagtatgcaaagtaattaaaaagcgtggaaataaacactagtaaaattaaggacaaaaagacatctatcttatctttcaggtactttatgccaacattttcttttctgttaaggttgttttagtttccagatagggctaattacaaaatgttaagcttctacccatcaaattacagtataaaagtaattgcctgtgtagaactacttgtcttttctaaagatttgcgtagataggaagcctg

SEQ ID NO: 573 - DNA, 60 bp, Homo sapiens
aaagtaattgcctgtgtagaactacttgtcttttctaaagatttgcgtagataggaagcc

SEQ ID NO: 574 - DNA, 1349 bp, Homo sapiens
aactacaacgtccggctttctgagttgggtggcgggaaaggcgatgagtaaaggccgggcagaagctgcggcgggagccgccgggatcctcctgaggtacctgcaggaacagaaccggccctacagctcccaggatgtgttcgggaacctacagcgggaacacggactgggcaaggcggtggtggtgaagacgctggagcagctggcgcaacaaggcaagatcaaagagaagatgtacggcaagcagaagatctattttgcggatcaggaccagtttgacatggtgagtgatgctgaccttcaagtcctagatggcaaaatcgtggccctcactgctaaggtgcagagcttgcagcagagctgccgctacatggaggctgagctcaaggaattatctagtgccctgaccacaccagagatgcagaaagaaatccaggagttaaagaaggaatgcgctggctacagagagagattgaagaacattaaagcagctaccaatcatgtgactccagaagagaaagagcaggtgtacagagagaggcagaagtactgtaaggagtggaggaagaggaagaggatggctacagagctgtctgatgcaatacttgaaggataccccaagagcaagaagcagttctttgaggaagttgggatagagacggatgaagattacaacgtcacactcccagacccctgaggggcccacggtcaggactggtggggactgcaggatgtcagaagagtgagatgtcttgcactggctaccttgtttttggttggcttttgttgttgttcctcttacttttcactttagcagagcagtcaggagacaagcataaaccagagcactgggtagagaggatgagggctggtggctgggggtagaccccacgcatttcattgtctaaattgcagtagcttgaggttaacatttagacttggaacaatgctaaaggaaagcatttggcaatatttattataatttaattttatataaaaatatttaatttcctctggatagtcaaacctgccagatatcaaacctgaggaaggcagaagtgaatttggagaactagggtagagagaggttgctataaaacgagcatttggagggcccacggcttcactcaggacctgctgggcttgtgtaccccaggagcccttttaagtatcttttgtacgcttttcaccccacccccaagtcctgggagaaatgcaggcaacactgagacatgggagaggccaagatatgcttgacagaaagggtgattttgaggctcagttaatatttcaaaattgtaaccgtagcaaaactgcattggtatttagaaaaataaaaaatttccaat

SEQ ID NO: 575 - DNA, 60 bp, Homo sapiens
gctacagagctgtctgatgcaatacttgaaggataccccaagagcaagaagcagttcttt

SEQ ID NO: 576 - DNA, 1182 bp, Homo sapiens
gcggccggcggcgtctcctcccgggacgctgaggggcccgaggagaccgtgaggctctggcctgcagctcgcgccgccatggacgctgccgaggtcgaattcctcgccgagaaggagctggttaccattatccccaacttcagtctggacaagatctacctcatcgggggggacctggggccttttaaccctggtttacccgtggaagtgcccctgtggctggcgattaacctgaaacaaagacagaaatgtcgcctgctccctccagagtggatggatgtagaaaagttggagaagatgagggatcatgaacgaaaggaagaaacttttaccccaatgcccagcccttactacatggaacttacgaagctcctgttaaatcatgcttcagacaacatcccgaaggcagacgaaatccggaccctggtcaaggatatgtgggacactcgtatagccaaactccgagtgtctgctgacagctttgtgagacagcaggaggcacatgccaagctggataacttgaccttgatggagatcaacaccagcgggactttcctcacacaagcgctcaaccacatgtacaaactccgcacgaacctccagcctctggagagtactcagtctcaggacttctagagaaaggcctggtgcaggcggcttgctgggggatgtgagcgctcaggatgtgatgaggtactcgtggttctggagctctagaaacacttctgatgcatgaaaaatgtgtgatggtgcaaggaatggattcaggatgttgttggagaaacaagtttgtgattagtccttaaaacttagctccctgggacattcttcaattccacatctgtttctagaaaccagccctttttccccccacttttgagaaataaaaaagccttaggtaaataagtcattctccctagcagagccacttgggtctcctgcatggaagccgtcacacttgggcaggtgttcagtgactggtaggtgtagatacagcaggagtggccatgtggtccacggctttttaccccttcttgatcctgatttcttgggctgaatttagactctctcacagaggtggctcacagagaaggatggcagatggtgcagccaacaatgctgaccggtgcttatcctctaagccctgatccacaataaaaatggacccaactcaaaaaaaaa

SEQ ID NO: 577 - DNA, 60 bp, Homo sapiens
atggattcaggatgttgttggagaaacaagtttgtgattagtccttaaaacttagctccc

SEQ ID NO: 578 - DNA, 2998 bp, Homo sapiens
gagaggagacaccgccgcagttgccggtacatcggggatttctggctctttcctcttcgccttaaattcgggtgtcttttatgaataatcaaaagcagcaaaagccaacgctatcaggccagcgttttaaaactagaaaaagagatgaaaaagagaggtttgaccctactcagtttcaagactgtattattcaaggcttaactgaaaccggtactgatttggaagcagtagctaagtttcttgatgcttctggagcaaaacttgattaccgtcgatatgcagaaacactctttgacattctggtggctggtggaatgctggccccaggtggtacactggcagatgacatgatgcgtacagatgtctgcgtgtttgcagcccaagaagatctagagaccatgcaagcatttgctcaggtttttaacaagttaatcaggcgctacaaatacctggagaaaggttttgaagatgaagtaaaaaagctgctgctgttcttgaagggtttttcagagtcggagaggaacaagctagctatgttgactggtgttcttctggctaatggaacacttaatgcatccattcttaatagcctttataatgaaaatttggttaaagaaggagtttcagcagcttttgctgtgaagctctttaaatcatggataaatgaaaaagatatcaatgcagtagctgcaagtcttcggaaagtcagcatggataacagactgatggaactctttcctgccaataagcaaagtgttgaacacttcacaaaatattttactgaggcaggcttgaaagagctttcagaatatgttcggaatcagcaaaccatcggagctcgtaaggagctccagaaagaacttcaagaacagatgtcccgtggtgatccatttaaggatataattttatatgtcaaggaggagatgaaaaaaaacaacatcccagagccagttgtcatcggaatagtctggtcaagtgtaatgagcactgtggaatggaacaaaaaagaggagcttgtagcagagcaagccatcaagcacttgaagcaatacagccctctacttgctgcctttactactcaaggtcagtctgagctgactctgttactgaagattcaggagtattgctatgacaacattcatttcatgaaagccttccagaaaatagtggtgcttttttataaagctgaagtcctgagcgaggagcccattttgaagtggtataaagatgcacatgttgcaaaggggaagagtgttttccttgagcaaatgaaaaagtttgtagaatggctcaaaaatgctgaagaagaatctgaatctgaagctgaagaaggtgactgaattttgaaactacaccctcagtaaagcaaacaggagttgtagataaaatgtcatgtctcatgtgtcctggttcttacatcttcctacctccctgtatcaagcatgatataagggctttcatggcaaattttattttaactgtttctatggttgctggaaatgttgggtttagtttctaaaaccatgttttaagtagctacaggagctatagatttgaatctaatgttgcattagtcttttcagttatcttctacctcctgtattttctactgtaataatgtaatttaaggccttccacaatgaacagttcactttattccctgggttttctataaacagttttaaggatatgatttggttaaaaaataatttgttataaaaattctgtttgcaaattaaactggaaaagtatccagagtctcaaaaggcaatgatttgtgagataatatggcatgcccggagccctgctcatcaatgaaaaacccatatgtaataatcgaattcatttaacatgaatcttgagtacgtggaccattgcttgcatgttaactttttgttttgttttgttttgttttgttttgcatttttaactccagatatcctaaagctcaattgtttggtctctggttttcatccttagagaagccatggagaacagacttgaaaagtttaggaaatcataatgtggcagaggtggtgggaagaagaaagttgagctttttccccttgagaaacttctgcatttagtttctatctttccaggcaaaacaaatgggtattcttttcatacaaccattttcaaatgaaccttagaaaagtcttaacatttaaggtattttatgcacagaatacacttagattgataggaaagaactcgtaatggagtttgagtaaagaaaatgactgatgtactaaacccagtaaaaattgttgaaaatgttaaaggtcagcatgttctaattgggaatctagatatagcttagatttcctattggcttagagtatttgctataacaaatgaagtgcaatgacaattatatattcctactcggtcatactggactggcttcgttctcttaatatactcagtaatgactcaagcctctggctattaacataccctagttgccgttttttaattgccatgagccaaatacttcttggtatacaattgatccatttattttaatggctgccttttcattttcatcttttcttgctgctacccatctatgtatgtagtcattggggggaaaatgtagccacattttttatgggaagactttgtgttaaaagtgaacattttgaaggtttttaactggtgaaactagcctggaataatgccaccagagactgagtggaaatcgccccttttgaaggtgccattcttatgagccaaaagtttgtcatttaaaagttcattttgagggaataacatgtaatataatttgaaataaaggtatagtaaccttaaaaagaacattataactgattgttgtgaatggggtgaatttgttaaaatgagtaactttgataaagtttttcatgcacaggcaaaatgtattcactagatttctacgtagtgatctgcttttactttgtaatttgtagttctcaaaagacttttttttaaaaaaataaagtccatacttacactt

SEQ ID NO: 579 - DNA, 60 bp, Homo sapiens
actcagtaatgactcaagcctctggctattaacataccctagttgccgttttttaattgc

SEQ ID NO: 580 - DNA, 4111 bp, Homo sapiens
acacaccacacacactcacactcacacacactcacacacactcatccccttgaatcttggggcaggaactcagaaaacttccagcccgggcagcgcgcgcttggtgcaagactcaggagctagcagcccgtccccctccgactctccggtgccgccgctgcctgctcccgccaccctaggaggcgcggtgccacccactactctgtcctctgcctgtgctccgtgcccgaccctatcccggcggagtctccccatcctcctttgctttccgactgcccaaggcactttcaatctcaatctcttctctctctctctctctctctctgtctctctctctctctctctctctctctctctcgcagggtggggggaagaggaggaggaattctttccccgcctaacatttcaagggacacaattcactccaagtctcttccctttccaagccgcttccgaagtgctcccggtgcccgcaactcctgatcccaacccgcgagaggagcctctgcgacctcaaagcctctcttccttctccctcgcttccctcctcctcttgctacctccacctccaccgccacctccacctccggcacccacccaccgccgccgccgccaccggcagcgcctcctcctctcctcctcctcctcccctcttctctttttggcagccgctggacgtccggtgttgatggtggcagcggcggcagcctaagcaacagcagccctcgcagcccgccagctcgcgctcgccccgccggcgtccccagccctatcacctcatctcccgaaaggtgctgggcagctccggggcggtcgaggcgaagcggctgcagcggcggtagcggcggcgggaggcaggatgagcgcacgcggtgagggcgcggggcagccgtccacttcagcccagggacaacctgccgccccagcgcctcagaagagaggacgcggccgccccaggaagcagcagcaagaaccaaccggtgagccctctcctaagagacccaggggaagacccaaaggcagcaaaaacaagagtccctctaaagcagctcaaaagaaagcagaagccactggagaaaaacggccaagaggcagacctaggaaatggccacaacaagttgttcagaagaagcctgctcaggaggaaactgaagagacatcctcacaagagtctgccgaagaggactagggggcgcaacgttcgatttctacctcagcagcagttggatcttttgaagggagaagacactgcagtgaccacttattctgtattgccatggtctttccactttcatctggggtggggtggggtggggtgggggaggggggggtggggtggggagaaatcacataaccttaaaaaggactatattaatcaccttctttgtaatcccttcacagtcccaggtttagtgaaaaactgctgtaaacacaggggacacagcttaacaatgcaacttttaattactgttttcttttttcttaacctactaatagtttgttgatctgataagcaagagtgggcgggtgagaaaaaccgaattgggtttagtcaatcactgcactgcatgcaaacaagaaacgtgtcacacttgtgacgtcgggcattcatataggaagaacgcggtgtgtaacactgtgtacacctcaaataccaccccaacccactccctgtagtgaatcctctgtttagaacaccaaagataaggactagatactactttctctttttcgtataatcttgtagacacttacttgatgatttttaactttttatttctaaatgagacgaaatgctgatgtatcctttcattcagctaacaaactagaaaaggttatgttcatttttcaaaaagggaagtaagcaaacaaatattgccaactcttctatttatggatatcacacatatcagcaggagtaataaatttactcacagcacttgttttcaggacaacacttcattttcaggaaatctacttcctacagagccaaaatgccatttagcaataaataacacttgtcagcctcagagcatttaaggaaactagacaagtaaaattatcctctttgtaatttaatgaaaaggtacaacagaataatgcatgatgaactcacctaattatgaggtgggaggagcgaaatctaaatttcttttgctatagttatacatcaatttaaaaagcaaaaaaaaaaaggggggggcaatctctctctgtgtctttctctctctctctccctctccctctctcttttcatgtgtatcagtttccatgaaagacctgaataccacttacctcaaattaagcatatgtgttacttcaagtaatacgttttgacataagatggttgaccaaggtgcttttcttcggcttgagttcaccatctcttcattcaaactgcacttttagccagagatgcaatatatccccactactcaatactacctctgaatgttacaacgaatttacagtctagtacttattacatgctgctatacacaagcaatgcaagaaaaaaacttactgggtaggtgattctaatcatctgcagttctttttgtacacttaattacagttaaagaagcaatctccttactgtgtttcagcatgactatgtatttttctatgtttttttaattaaaaatttttaaaatacttgtttcagcttctctgctagatttctacattaacttgaaaattttttaaccaagtcgctcctaggttcttaaggataattttcctcaatcacactacacatcacacaagatttgactgtaatatttaaatattaccctccaagtctgtacctcaaatgaattctttaaggagatggactaattgacttgcaaagacctacctccagacttcaaaaggaatgaacttgttacttgcagcattcatttgttttttcaatgtttgaaatagttcaaactgcagctaaccctagtcaaaactatttttgtaaaagacatttgatagaaaggaacacgtttttacatacttttgcaaaataagtaaataataaataaaataaagccaaccttcaaagaacttgaagctttgtaggtgagatgcaacaagccctgcttttgcataatgcaatcaaaaatatgtgtttttaagattagttgaatataagaaaatgcttgacaaatattttcatgtattttacacaaatgtgatttttgtaatatgtctcaaccagatttattttaaacgcttcttatgtagagtttttatgcctttctctcctagtgagtgtgctgactttttaacatggtattatcaactgggccaggaggtagtttctcatgacggcttttgtcagtatggcttttagtactgaagccaaatgaaactcaaaaccatctctcttccagctgcttcagggaggtagtttcaaaggccacatacctctctgagactggcagatcgctcactgttgtgaatcaccaaaggagctatggagagaattaaaactcaacattactgttaactgtgcgttaaataagcaaataaacagtggctcataaaaataaaagtcgcattccatatctttggatgggccttttagaaacctcattggccagctcataaaatggaagcaattgctcatgttggccaaacatggtgcaccgagtgatttccatctctggtaaagttacacttttatttcctgtatgttgtacaatcaaaacacactactacctcttaagtcccagtatacctcatttttcatactgaaaaaaaaagcttgtggccaatggaacagtaagaacatcataaaatttttatatatatagtttatttttgtgggagataaattttataggactgttctttgctgttgttggtcgcagctacataagactggacatttaacttttctaccatttctgcaagttaggtatgtttgcaggagaaaagtatcaagacgtttaactgcagttgactttctccctgttcctttgagtgtcttctaactttattctttgttctttatgtagaattgctgtctatgattgtactttgaatcgcttgcttgttgaaaatatttctctagtgtattatcactgtctgttctgcacaataaacataacagcctctgtga

SEQ ID NO: 581 - DNA, 60 bp, Homo sapiens
gttgtacaatcaaaacacactactacctcttaagtcccagtatacctcatttttcatact

SEQ ID NO: 582 - DNA, 2644 bp, Homo sapiens
ggcacgaggggccgacgcgagcgccgcgcttcgcttcagctgctagctggcccaagggaggcgaccgcggagggtggcgaggggcggccaggacccgcagccccggggccgggccggtccggaccgccagggagggcaggtcagtgggcagatcgcgtccgcgggattcaatctctgcccgctctgataacagtccttttccctggcgctcacttcgtgcctggcacccggctgggcgcctcaagaccgttgtctcttcgatcgcttctttggacttggcgaccatttcagagatgtcttccagaagtaccaaagatttaattaaaagtaagtggggatcgaagcctagtaactccaaatccgaaactacattagaaaaattaaagggagaaattgcacacttaaagacatcagtggatgaaatcacaagtgggaaaggaaagctgactgataaagagagacacagacttttggagaaaattcgagtccttgaggctgagaaggagaagaatgcttatcaactcacagagaaggacaaagaaatacagcgactgagagaccaactgaaggccagatatagtactaccgcattgcttgaacagctggaagagacaacgagagaaggagaaaggagggagcaggtgttgaaagccttatctgaagagaaagacgtattgaaacaacagttgtctgctgcaacctcacgaattgctgaacttgaaagcaaaaccaatacactccgtttatcacagactgtggctccaaactgcttcaactcatcaataaataatattcatgaaatggaaatacagctgaaagatgctctggagaaaaatcagcagtggctcgtgtatgatcagcagcgggaagtctatgtaaaaggacttttagcaaagatctttgagttggaaaagaaaacggaaacagctgctcattcactcccacagcagacaaaaaagcctgaatcagaaggttatcttcaagaagagaagcagaaatgttacaacgatctcttggcaagtgcaaaaaaagatcttgaggttgaacgacaaaccataactcagctgagttttgaactgagtgaatttcgaagaaaatatgaagaaacccaaaaagaagttcacaatttaaatcagctgttgtattcacaaagaagggcagatgtgcaacatctggaagatgataggcataaaacagagaagatacaaaaactcagggaagagaatgatattgctaggggaaaacttgaagaagagaagaagagatccgaagagctcttatctcaggtccagtttctttacacatctctgctaaagcagcaagaagaacaaacaagggtagctctgttggaacaacagatgcaggcatgtactttagactttgaaaatgaaaaactcgaccgtcaacatgtgcagcatcaattgcttgtaattcttaaggagctccgaaaagcaagaaatcaaataacacagttggaatccttgaaacagcttcatgagtttgccatcacagagccattagtcactttccaaggagagactgaaaacagagaaaaagttgccgcctcaccaaaaagtcccactgctgcactcaatgaaagcctggtggaatgtcccaagtgcaatatacagtatccagccactgagcatcgcgatctgcttgtccatgtggaatactgttcaaagtagcaaaataagtatttgttttgatattaaaagattcaatactgtattttctgttagcttgtgggcattttgaattatatatttcacattttgcataaaactgcctatctacctttgacactccagcatgctagtgaatcatgtatcttttaggctgctgtgcatttctcttggcagtgatacctccctgacatggttcatcatcaggctgcaatgacagaatgtggtgagcagcgtctactgagactactaacattttgcactgtcaaaatacttggtgaggaaaagatagctcaggttattgctaatgggttaatgcaccagcaagcaaaatattttatgttttgggggtttgaaaaatcaaagataattaaccaaggatcttaactgtgttcgcattttttatccaagcacttagaaaacctacaatcctaattttgatgtccattgttaagaggtggtgatagatactattttttttttcatattgtatagcggttattagaaaagttggggattttcttgatctttattgctgcttaccattgaaacttaacccagctgtgttccccaactctgttctgcgcacgaaacagtatctgtttgaggcataatcttaagtggccacacacaatgttttctcttatgttatctggcagtaactgtaacttgaattacattagcacattctgcttagctaaaattgttaaaataaactttaataaacccatgtagccctctcatttgattgacagtattttagttatttttggcattcttaaagctgggcaatgtaatgatcagatctttgtttgtctgaacaggtatttttatacatgctttttgtaaaccaaaaacttttaaatttcttcaggttttctaacatgcttaccactgggctactgtaaatgagaaaagaataaaattatttaatgttttaaaaaaaaaaaaaaaaaaaa

SEQ ID NO: 583 - DNA, 60 bp, Homo sapiens
tttatccaagcacttagaaaacctacaatcctaattttgatgtccattgttaagaggtgg

SEQ ID NO: 584 - DNA, 1418 bp, Homo sapiens
cacgaggggagtccgggaggggtcgctttgctcctccggaaggcttccccttcagccaatcaccgttcgaggcccgcccccgtcgccggaaggagccgtcgccccgagcaactacaacgtccggctttctgagttgggtggcgggaaaggcgatgagtaaaggccgggcagaagctgcggcgggagccgccgggatcctcctgaggtacctgcaggagcagaaccggccctacagctcccaggatgtgttcgggaacctacagcgggaacacggactgggcaaggcggtggtggtgaagacgctggagcagctggcgcaacaaggcaagatcaaagagaagatgtacggcaagcagaagatctattttgcggatcaggaccagtttgacatggtgagtgatgctgaccttcaagtcctagatggcaaaatcgtggccctcactgctaaggtgcagagcttgcagcagagctgccgctacatggaggctgagatgcagaaagaaatccaggagttaaagaaggaatgcgctggctacagagagagattgaagaacattaaagcagctaccaatcatgtgactccagaagagaaagagcaggtgtacagagagaggcagaagtactgtaaggagtggaggaagaggaagaggatggctacagagctgtctgatgcaatacttgaaggataccccaagagcaagaagcagttctttgaggaagttgggatagagacggatgaagattacaacgtcacactcccagacccctgaggggcccacggtcaggactggtggggactgcaggatgtcagaagagtgagatgtcttgcactggctaccttgtttttggttggcttttgttgttgttcctgctactttcacctttaagcagagcagtcaggagacaagcataaaccagagcactgggtagagaggatgagggctggtggctgggggtagacccagcccatttcattgtctaaattgcagtagcttgaggttaacatttagacttggaacaatgctaaaggaaagcatttggcaatatttattataatttaattttatataaaaatatttaatttcctctggatagtcaaacctgccagatatcaaacctgaggaaggcagaagtgaatttggagaactagggtagagagaggttgctataaaacgagcatttggagggcccacggcttcactcaggacctgctgggcttgtgtaccccaggagcccttttaagtatcttttgtacgcttttcaccccacccccaagtcctgggagaaatgcaggcaacactgagacatgggagaggccaagatatgcttgacagaaagggtgattttgaggctcagttaatatttcaaaattgtaaccgtagcaaaactgcattggtatttagaaaaaaaaaaaaaaa

SEQ ID NO: 585 - DNA, 60 bp, Homo sapiens
aaattgcagtagcttgaggttaacatttagacttggaacaatgctaaaggaaagcatttg

SEQ ID NO: 586 - DNA, 3384 bp, Homo sapiens
gcttctaaacaacctaccctccttccccattttctgtggtccaactaccctcggcgatcccaggcttggcggggcaccgcctggcctctcccgttcctttaggctgccgccgctgcctgccgccatggcagagttgggcctaaatgagcaccatcaaaatgaagttattaattatatgcgttttgctcgttcaaagagaggcttgagactcaaaactgtagattcctgcttccaagacctcaaggagagcaggctggtggaggacaccttcaccatagatgaagtctctgaagtcctcaatggattacaagctgtggttcatagtgaggtggaatctgagctcatcaacactgcctataccaatgtgttacttctgcgacagctgtttgcacaagctgagaagtggtatcttaagctacagacagacatctctgaacttgaaaaccgagaattattagaacaagttgcagaatttgaaaaagcagagattacatcttcaaacaaaaagcccatcttagatgtcacaaagccaaaacttgctccacttaatgaaggtggaacagcagaactcctaaacaaggaaattttaagacttcaagaagagaatgagaaattgaagtcaaggttgaagaccattgaaatacaggctacaaatgcactggatgaaaagtcaaaactagaaaaagcactgcaagatttacagcttgatcaaggaaatcaaaaggattttataaaggcccaagacttaagtaacttagaaaacactgtcgctgccttaaagagtgagtttcagaagacacttaatgacaagacagaaaaccagaagtcactggaggagaatctggcgacagccaagcacgatctactcagggttcaggagcagctgcacatggctgaaaaggaattagaaaagaaatttcagcaaacagcagcttatcgaaacatgaaagagattcttaccaagaagaatgaccaaatcaaagatctgaggaaaagactggcacaatatgaacctgaagattaaaactgaagatttcctctggaagctaccacatgcaaacatacaagcagtctcacctcaggcatgtattttgaaaagcattttgtcatatcccctctccttatttttctaatatttagactttgaatatttagaactagagttcctattttcagctagttgaaaacagagaaaacctagtgattctgtctggtcatcccacacacctctctactgagtgctccagagtcttagctcacatgcactgagaattctttacagcaaagaagagatttttagagtgggaagaagaggcttatccttctgcattagtataaagagtctgtatttttaataaatgttaaataagctaacaatgtttgtacttatgcattccccatgggtaaaaataaataatagcattgttaaagatagttattaccaaaaaaagagagttattacaaataaatatgtctctttatttttaaaaatgaaatcttaattcatttactctatttgatgataaactataaattcattgaaaatgtgaattctattatgggtagcctttttaccaattataaggaaaatttacagcagtgaacatgaacattcacttagcttcctcagtctctccatcttaaagatcatttatcagaggaggttcagcattttttgcagcataacttttcatgagtctgtattactaatggataagtcaaatccatcctgcacttctacagtttagaaagtatctggactcagaataaatgtaatatttatacttgtttccagaatgttattttacattttatgttcaataagaacactttttaaaagacgtatattcaacataaaatcagctatcagacttcagattagactttatttatgtgggtctataataattgtattttcaagaggttttcactatatttgtattggcctggttttctcagacgattttggacaaatcattagaaactgggcatcatatccacagttatgtaaggcagtgatatactataaggataaacaaagtcaagtccataaagcaataatccctcagaaggaaagtccttacttttcacatattaatatttagtaatttttcctgcttctaaaagtgagagtatcacaccctaaatgaacactgtctactaagagacatcattccatttccacaaatgaagattttattccaagaaacgagtttactgattggagcatagggcttgttgttatttttattcaagcttttagtaatagccttgaatttattatttttcttataggctttttgttaaaatagtgaaggaacaaatgttaaagggtaagataatttccctgcaaaaggacacagaaggcagtcttaagaagatgaatggatgagagaagggagagaataaaatgcaataacgagccagcatttactatgtattttctcctcacctgtctctccatatttaggtcacttaccagtttctgtgcccttttggagcttttgttgagggcttcattctcaccctgtatttctttagccctaaattgacactctctccaaaaatccattccattgtctgtggaccaagatgttctatgtaattcagaagcagaactcttggctaaagggctagtgtggccttcagaaaccattcaattattttctccctacacctttgtcagtttgaaaccagtgaggaaaaaaggtatgttgataagaaacctatattgctaggtagaatttgtacttgttttcttggtagcagttttgaaatattctgtacagtacgttcctattgtttaataataaattcaaaaatatttctaaaaccttaaaaccaactatgccaagcattaagataaacaaatatgatgttctttgacgtaaatcaacgtgatgattctttcacatgtaaacacattttagtgtttctggtttgtcatttttgttgttgttgttgttgttgttatttactctataccctttagcaaaatacagttttaaatttttattgtttttagtagtttcccaactttaagacttatctaatttaactgagaaagaaagcctttttcatatatatatatattggatttctaaggatggtggtttgagccttgattagacttttgatgtgctaagccagacaggcagtctgtacattgatggccatcacaatgcagctttggtttaatttaattcaggcctgctgctgagttatgcacagactttttgttgaccaaaataaaatataaagggttttcttctgtttgacatttgtgttcattttttctctttatgtattacattttaacctatattaaataaatgtttaaatgataatttgcttatgtcttataaaactcagcataagaaaaat

SEQ ID NO: 587 - DNA, 60 bp, Homo sapiens
tggatttctaaggatggtggtttgagccttgattagacttttgatgtgctaagccagaca

SEQ ID NO: 588 - DNA, 2082 bp, Homo sapiens
gacaggtctgtgaagcaggcaggttgctcagctgcccccggagcggttcctccacctgaggcagactccacgtcggctggcatgagccggcgcccctgcagctgcgccctacggccaccccgctgctcctgcagcgccagccccagcgcagtgacagccgccgggcgccctcgaccctcggatagttgtaaagaagaaagttctaccctttctgtcaaaatgaagtgtgattttaattgtaaccatgttcattccggacttaaactggtaaaacctgatgacattggaagactagtttcctacacccctgcatatttggaaggttcctgtaaagactgcattaaagactatgaaaggctgtcatgtattgggtcaccgattgtgagccctaggattgtacaacttgaaactgaaagcaagcgcttgcataacaaggaaaatcaacatgtgcaacagacacttaatagtacaaatgaaatagaagcactagagaccagtagactttatgaagacagtggctattcctcattttctctacaaagtggcctcagtgaacatgaagaaggtagcctcctggaggagaatttcggtgacagtctacaatcctgcctgctacaaatacaaagcccagaccaatatcccaacaaaaacttgctgccagttcttcattttgaaaaagtggtttgttcaacattaaaaaagaatgcaaaacgaaatcctaaagtagatcgggagatgctgaaggaaattatagccagaggaaattttagactgcagaatataattggcagaaaaatgggcctagaatgtgtagatattctcagcgaactctttcgaaggggactcagacatgtcttagcaactattttagcacaactcagtgacatggacttaatcaatgtgtctaaagtgagcacaacttggaagaagatcctagaagatgataagggggcattccagttgtacagtaaagcaatacaaagagttaccgaaaacaacaataaattttcacctcatgcttcaaccagagaatatgttatgttcagaaccccactggcttctgttcagaaatcagcagcccagacttctctcaaaaaagatgctcaaaccaagttatccaatcaaggtgatcagaaaggttctacttatagtcgacacaatgaattctctgaggttgccaagacattgaaaaagaacgaaagcctcaaagcctgtattcgctgtaattcacctgcaaaatatgattgctatttacaacgggcaacctgcaaacgagaaggctgtggatttgattattgtacgaagtgtctctgtaattatcatactactaaagactgttcagatggcaagctcctcaaagccagttgtaaaataggtcccctgcctggtacaaagaaaagcaaaaagaatttacgaagattgtgatctcttattaaatcaattgttactgatcatgaatgttagttagaaaatgttaggttttaacttaaaaaaaattgtattgtgattttcaattttatgttgaaatcggtgtagtatcctgaggtttttttccccccagaagataaagaggatagacaacctcttaaaatatttttacaatttaatgagaaaaagtttaaaattctcaatacaaatcaaacaatttaaatattttaagaaaaaaggaaaagtagatagtgatactgagggtaaaaaaaaaattgattcaattttatggtaaaggaaacccatgcaattttacctagacagtcttaaatatgtctggttttccatctgttagcatttcagacattttatgttcctcttactcaattgataccaacagaaatatcaacttctggagtctattaaatgtgttgtcacctttctaaagctttttttcattgtgtgtatttcccaagaaagtatcctttgtaaaaacttgcttgttttccttatttctgaaatctgttttaatatttttgtatacatgtaaatatttctgtattttttatatgtcaaagaatatgtctcttgtatgtacatataaaaataaattttgctcaataaaattgtaagcttaaaaaaaaaaaaaaaaaa

SEQ ID NO: 589 - DNA, 60 bp, Homo sapiens
gattattgtacgaagtgtctctgtaattatcatactactaaagactgttcagatggcaag

SEQ ID NO: 590 - DNA, 875 bp, Homo sapiens
gtctgcgcccctcgctgtcccgcgaccccggcgcgggtgcctcgggcccccctcgcgcgccgccatggtgggccggctgagcctacaggatgtgcccgagctcgtggacgcgaagaagaagggcgacggcgtcctggacagcccggactcggggctgccccccagccccagccccagccactgggggctcgcggcgggcggaggcggcggagagcgcgcggcggcaccggggacgctggagcccgacgcggcggcggcgacccccgcggctccgagtccagcgtctctccccctggctcccggctgtgcgctgaggctttgtcccctgtcctttggcgaaggagtggagtttgaccccttaccaccaaaggaagtaaggtacacctccttggtcaagtacgactccgagaggcacttcatcgacgacgtgcagctgcccctgggcctggcggtggcctcctgcagccagacggtcacctgtgtccccaatggcacgtggcgcaactacaaggccgaggtgcgcttcgagccacgccacaggcccacccgcttcctcagtaccaccatcgtgtaccccaagtaccccaaggccgtctacaccaccaccctggattacaactgccgcaagacgctgaggaggtttctgtccagcgtggagctcgaagccgcggagctcccgggcagcgacgacctctctgatgaatgctgacccagcaggctgggctggggtcggaccggctctcccgctgtcctgcccccgactgccctggccaagctgggcgaccttacccttcacgtcattccagccccagaggagtctaacctagagatacctccaagcgcggccgggggaagagaaaaaaaaaaaaaaaaaa

SEQ ID NO: 591 - DNA, 60 bp, Homo sapiens
gtgtgaaatacgtcagtgaagtaagtagcagtgagcgattgtgaatgtgtaatgtaaatg

SEQ ID NO: 592 - DNA, 3626 bp, Homo sapiens
gacggcttagccgcggtgcagactgcggcggcggtggtctgaggaagttctatcttggcgctaaagcggagacgcatcccccgacccgaggctacgatgagcacaccggccgtgccccaggacctgcagctgcccccgagtcagagggcgcagtccgcattcaaagagcaaagaagacaaaaactcaaggaacatctgttgagaagaaaaacgctttttgcatacaagcaggaaaatgagatgttatccagtagagatcagagagttgtgacatctgaggaccaagttcaagaagggactaaagtgctgaaacttaaaacaaaaatggctgataaagaaaacatgaagagacctgcagagagcaaaaataatacagtggtggggaaacattgtattcctttaaaaccttcaaatgaactaaccaattcaactgtagtaattgacacacataaacctaaggatagtaatcaaactccgcatttgttactaactgaagatgatccccaaagtcaacatatgacattaagccaggcatttcaccttaaaaacaatagtaaaaagaaacaaatgactacagaaaaacaaaagcaagatgctaacatgcccaagaaacctgtgcttggatcttatcgtggccagattgttcagtctaagattaattcatttagaaaacctctacaagtcaaagatgagagttctgcagcaacaaagaaactttcagccactatacctaaagccacaaaacctcagcctgtaaacaccagcagtgtaacagtgaaaagtaatagatcctccaatatgactgccactactaaatttgtgagcactacatctcagaacacacaacttgtgcgacctcctattagaagtcatcacagtaatacccgggacactgtgaaacaaggcatcagtagaacctctgccaatgttacaatccggaaagggcctcatgaaaaagaactattacaatcaaaaacagctttatctagtgtcaaaaccagttcttctcaaggtataataagaaataagactctatcaagatccatagcatctgaagttgtagccaggcctgcttcattgtctaatgataaactgatggaaaagtcagagcccgttgaccagcgaagacatactgcaggaaaagcaattgttgatagtagatcagctcagcccaaagaaacctcggaagagagaaaagctcgtctgagtgagtggaaagctggcaaaggaagagtgctaaaaaggccccctaattcagtagttactcagcatgagcctgcaggacaaaatgaaaaaccagttgggtctttttggactaccatggcagaagaagatgaacaaagattatttactgaaaaagtaaacaacacattttctgaatgcctgaacttgattaatgagggatgtccaaaagaagatatactggtcacactgaatgacctgattaaaaatattccagatgccaaaaagcttgttaagtattggatatgtcttgcacttattgaaccaatcacaagtcctattgaaaatattattgcaatctatgagaaagccattctggcaggggctcagcctattgaagagatgcgacacacgattgtagatattctaacaatgaagagtcaagaaaaagctaatttaggagaaaatatggagaagtcttgtgcaagcaaggaagaagtcagagaagtcagtattgaagatacaggtgttgatgtagatccagaaaaactggaaatggagagtaaacttcatagaaatttgctacttcaagattgtgaaaaagagcaagacaacaaaacaaaagatccaacccatgatgctaaaacccccaatacagaaacgaggacaagttgcttaattaaatataatgtgtctactacgccatacttgcaaagtgtgaaaaaaaaggtgcagtttgatggaacaaattccgcatttaaagagctgaagtttttaacaccagtgagacgttctcgacgtcttcaagagaaaacttctaaattgccagatatgttaaaagatcattatccttgtgtgtcttcattggaacagctaacggagttgggaagagaaactgatgcttttgtatgccgccctaatgcagcactgtgccgggtgtactatgaggctgatacaacataagggaaataaagctctgttagggaatggggtttttattatttgtggggtgttttgttttgagtagctttatattgctcttaggtctggagttggccatgtacctatgtatcctaagcattcacggcagtgagctcctttactaacattcatgttatggcaagagttgtcctctacattggaaagctaatcctaccttgtcagtttcaaccaactgagttttttctttaagaaaggtaaattttgtcagctagtttactatgttccttgaatataaacaggttataatactaccctgttcactttactaaatataagtacagtaatgatgcataattagaaaatgaggtattctaggtaaaatgtatgtttgccttgacatgtttttaaaagttatgatgtacctccctgcctttaaacagaatacttttttcttttttttggcctttctcagattagtcaaaaattctatagaatgactcacttcgaatactaagacacaggaggtttagcctgctttcttaccaaattcatgttacccagacttgtgttctcttgcgtcccttggactgcctgttgattgatggaaagtgtctgcactgacacttttcgtcagtagtctgtagtttcgtggcctcttttgattataactggggtcaccaagaaggtttacttaattaaataccgcatttctaagagaagatactttgtgtaagaaaagatgccacatttagtggtttaacttttgtaacttcacttgatagtttttaagcaattagaatggagttagggaaagaacatatcatactgaacaaatgtcattctagtttagatagcatttctaagataactgatactaatacttgttttcttccctataacataaaaaacttcactgttaagtcatgtcccttgaaacatgatagttacatacacagttttctctccacacataaataacaccactaaagttgttttgtaaggttccaaactaatatggcatatatcaactctacagtttcaaataaatgactttttaattgtaaaagattagttgaaaaactgtatgaatgtgaagatcacatgcttagtcatttctatgttcattccactttgtatatcttttctatttattgacttctcatgttctagagagtaggacttttattccgtgtacctgatatatatacaattaaaatatctgtataattatgttttaatgaggtttatttcaacagatattttatgaaatgcagtttaaccacagtgaatgaattttagctttgcttttgaaatacattgtaagatttgacttgaggtttttgacacttaagtacatgcttaatgatatattttcaaaagtcatcagtctacttacataaactttacctaatttttttcactttaacaaaaacataactatgcccttgttttttcatactttgacccaaaatatgccattttgaaataaaatttaagctttg

SEQ ID NO: 593 - DNA, 60 bp, Homo sapiens
tctctccacacataaataacaccactaaagttgttttgtaaggttccaaactaatatggc

SEQ ID NO: 594 - DNA, 1617 bp, Homo sapiens
gacccagtctcaaaaaaaaaaaaaagtgtgtgtgtgtgtatatatatgtatatatatatacacacacacacactttccaataccagtcggcattacccgccctttggtttcttttgctttggatttcagcccccatatcatttctggtaacagagcacagcaatagaatttctgggaagcagaccttgtgaatcgtgcctgtgtcttaattcacaaagggtaagtgaatgccgttgaaaggtgtttcatacacttaccccagaaatgagagcctgtctcatgcaggagtcgggaggcagcgatgtcagggaactgggactatgtctttatgactgtgatggtggtaaccaagtggggtggtcccctctggggagctgagtaagaacgcaaaggtttgggtcagtgattaggaagactataatatgactttgtgcatgcccgggagggctgccttgtagagaggatgtgagcagcttagtcgctcatctggccctgtgattcaggcttatggagcgttaagaataacagctgtcaaatggcctagacatggttaatgcaatttgttgctagtggaaatcctgaattgcttcctttctgtgatcactgctacttcttaagatgcttttgatgaatgtcatctgccttacaagttgacacctgataacttctccctgatgggtttccgaactggctgacttaaccaaaaagccagctcttgccatctatcttgcattaaaaggaattcctgaggctcctaaggggtcagctgccccactcctgacttttttatttttaatggtctataccttctgcaacatttttgtttatggccatttgaatagttggactttgactcctcacttgtgaataataggaatatattttgcagaatctaacataatacccttaaaattcatactggacaaccatcagtgtgatgtatagtatctggtgtaaacaaattttattcagcatattaaattattctgtgttttgcttttccttgatatgtaggaggtgcaccagtaccagtttttctcttgtggtggcttaaaacgctgattgccatttgcattgtctactgaaaagctgtggcagcgagtggtattattgaccatgtgttctcatgtctttttgcagatttaaaggttttattgtagtgtccatttaatatctgcatgtgtgtttaatctctgaataccatgtaattaaactgattaacttgtgatggtgatggtgattagcacacactaaaaacccaatgaagcaattgtctccctcttcttaactggaaatcacacttgtgaggtatggtatccattatcaacagtggattcatgattgacttcatattttgtgtatctggttataaattttgtatagcatttaatttggcacttaatataaatccatttgatttgaatagtgtgtgtgtgtacatggtgtgtgtgtgtgtgtgcactttagtttcgtgagccttgggaaactgattctacaaatatcttatatagagataaatgtatcaggcatttttttgcaaagcgatatatacattcctcttatttattaaatcactggctttggtgttatgtagagatatttgtagatctcagaaca

SEQ ID NO: 595 - DNA, 60 bp, Homo sapiens
tggaaatcacacttgtgaggtatggtatccattatcaacagtggattcatgattgacttc

SEQ ID NO: 596 - DNA, 1835 bp, Homo sapiens
ctccaagatgtgcatagccaaactgggatagaaggcaaactccccaaagctacctgctggttttgagaggggtggtaagacatggcaattcccaggagtagtagaaaataatatgcctgactaccaacagctcaagtatgcttatttgcacatcctagacttggtgtctgtaagactcagttaccacttttattttcctgtagctaggagttagcaaaaggaactggggccttccagccgagccactaaacctgtcttatttggaatggggattgtccagcgaagggagcaaacatgaattagatgttaagctattgagctgaagaaaagaaagcagttcacatttaggtgaaatagatgatgttatcaggaagccaggttcccaccagagtcggtgcttggtacctggtctctccagtctcaacagactcaggtcaggtctctcacccaggaagcaaccactcaataaaatagagaacatctgagaattacaaatgtctatgcttgattgctcctctaaatccagtgcataggttaaccctgcatgcccatttcttcctgggcttcttgatggcaatgtgttctaataactggtcttgtgttcatgctaaagacaaacttacatgaagtttttcagtttaagacattctagtgaatggctgctatgtgtttctggcactcattcctaaccaagtctttagagatttcagatgaccttaaagatgcaatatctttttctttctttctttctttctttttttctgagacaagagttgcgccctgtcgcccagactggggtgctggagtgcagtggtgcgatctcagctcactgcagcctctgcttcccaggttcaagtgtttctcctgcctcagccttccgagtagctggaattacaggcatgtaccactatgcctggctaattttttatttctatatttttagtagagatggggtttcatcatgtttgccaggctggtctcgaactcctggcctcaagtgatccgcccacctcagcctcccaaagtgctgggattacaggcgcgagccaccgcgcctggccaaagatgcaaattcttgtttggatttatgctctgcctcttcccagcattttcttatctgtagccctgcttgcttgagagtatacttggataagaagtattgctgttgagggagctataagaaaaggattcttcttccagaagtaaagaactcatctttagagtacctttaaatgaattttgtttttctttcttattttgaggtggattggtcttctctttttttgggtttccagctcactgggactctcagaccttacctttccagctcaaacaccattagttaaattccttcattctcattagaatgcagcctgctgagtatgtgggtttcactgccggagtccatcatttagccagtatacatagaggaactgcttcgaatcaaggcaactggtgaagggcttagcatgttggcagcaatatcccagagattgaatctgtttgcattttcctcatctaggataacagctgcttgaagccagggctcttagccctttgcattccccttgagcgaggaagccacactgcctttctgtgtctggttcagagctcttccttcttggcatgttttctggactacatgcacatgggcagctatagattaatctgcaaaacctagtcacttacctacccataatatctgggaaggtgtggtatttgttttaaagaaacattgtttctttgggagggcagtttctgtctggactttgaggtggacttagttatccctacagttctttaactctcagctttttaataaaagatgaaatcag

SEQ ID NO: 597 - DNA, 60 bp, Homo sapiens
ggagtccatcatttagccagtatacatagaggaactgcttcgaatcaaggcaactggtga

SEQ ID NO: 598 - DNA, 1826 bp, Homo sapiens
cacgtcggctgctgggaagatctggattctcgtttcaggtcaccatcagaaaagctaagtttgctgtatagtgaggatcaggagatctgatcctgattgcagaaccttccctgattacagaatcttggatgatttcacaaaagttcatcttcattgcagatacctgcctttctttctaggttgtatctcccacttcacccttctagaccatcccagaagatctataagatttcatctgggaaatcactaggagttcttggaagggaaagaaggaagattgttggttggaataaaaacagggttgaatgagttccagaaagcagggttctcaacctcgtggacagcaatctgcagaagaagagaacttcaaaaaaccaactagaagcaacatgcagagaagtaaaatgagaggggcctcctcaggaaagaagacagctggtccacagcagaaaaatcttgaaccagctctcccaggaagatggggtggtcgctctgcagagaaccccccttcaggatccgtgaggaagaccagaaagaacaagcagaagactcctggaaacggagatggtggcagtaccagcgaagcacctcagccccctcggaagaaaagggcccgggcagaccccactgttgaaagtgaggaggcgtttaagaatagaatggaggttaaagtgaagattcctgaagaattaaaaccatggcttgttgaggactgggacttagttaccaggcagaagcagctgtttcaactccctgccaagaaaaatgtagatgcaattctggaggagtatgcaaattgcaagaaatcgcagggaaatgttgataataaggaatatgcggttaatgaagttgtggcaggaataaaagaatatttcaatgtgatgttgggcactcagctgctctacaaatttgagaggccccagtatgctgaaatcctcttggctcaccctgatgctccaatgtcccaggtttatggagcaccacacctactgagattatttgtaagaattggagcaatgttggcctatacgccccttgatgagaaaagccttgcattattgttgggctatttgcatgatttcctaaaatatctggcaaagaattctgcatctctctttactgccagtgattacaaagtggcttctgctgagtaccaccgcaaagccctgtgagcgtctacagacagctcaccatttttgtcctgtatctgtaaacactttttgttcttagtctttttcttgtaaaattgatgttctttaaaatcgttaatgtataacagggcttatgtttcagtttgttttccgttctgttttaaacagaaaataaaaggagtgtaagctccttttctcatttcaaagttgctaccagtgtatgcagtaattagaacaaagaagaaacattcagtagaacattttattgcctagttgacaacattgcttgaatgctggtggttcctatccctttgacactacacaattttctaatatgtgttaatgctatgtgacaaaacgccctgattcctagtgccaaaggttcaacttaatgtatatacctgaaaacccatgcatttgtgctctttttttttttatggtgcttgaagtaaaacagcccatcctctgcaagtccatctatgttgttcttaggcattctatctttgctcaaattgttgaaggatggtgatttgtttcatggtttttgtatttgagtctaatgcacgttctaacatgatagaggcaatgcattattgtgtagccacggttttctggaaaagttgatattttaggaattgtatttcagatcttaaataaaatttgtttctaaatttc

SEQ ID NO: 599 - DNA, 60 bp, Homo sapiens
aagctccttttctcatttcaaagttgctaccagtgtatgcagtaattagaacaaagaaga

SEQ ID NO: 600 - DNA, 2189 bp, Homo sapiens
aggggcgggcccggcgcgcgcgggaagtctctgtagggcggccggctaccctcagccgccgcgcgtcatggccctttcggtgcccggctactcaccgggcttccgaaagccgcccgaggtagtgcggctccgacggaaaagggcccggagccgtggagctgccgcctccccgccccgtgagctgacggagccggcggcccgccgagccgccctggtggcggggctgcctcttcgccctttccctgctgcggggggcagaggcggtggcagcggcggcggcccggccgctgctcggaggaaccccttcgcccgcctggacaaccgaccgcgggtcgccgcggagccccccgacgggccggcccgcgagcagccggaggccccggtcccgtttttagattctaatcaagaaaatgatttgctatgggaagagaagtttcctgaaagaacaactgttactgaattacctcagacttcacatgtatcattctccgagcctgatattccgtcctcaaaaagtactgagttacctgtggactggagtattaaaacgcgactccttttcacctcttctcaaccctttacctgggcagatcatttgaaagcacaggaagaagctcaaggtcttgtccagcattgtagggcaacagaagttactttgcctaaaagtatacaggatcccaaactctcctctgagctccgttgtaccttccagcagagccttatctattggctccaccctgctttgtcttggctaccactgttccctcgtattggagctgatagaaaaatggctggaaagacaagtccttggtcaaatgatgcaaccctgcagcatgttttaatgagtgactggtctgtgagctttacttctctatataatttgctgaagacaaaactttgcccctatttctacgtttgtacctatcagtttactgtcctgttccgagcagcaggattagctggaagtgacttaatcacagctctcatatctccaacaactcgaggtttaagagaagctatgagaaatgaaggtattgaattttctctgcctttaataaaagaaagtggccataagaaggagacagcatctggaacaagcttgggatatggggaggagcaagccatcagtgatgaggatgaagaggaaagtttttcctggctggaagagatgggtgtgcaagataaaattaaaaagccagacatactttctatcaagctgcgtaaagagaaacatgaagtacaaatggatcacagacctgaatctgttgtgttggtaaaaggaatcaacacctttacattgctcaattttttgattaactctaagagtttagttgctacctcaggtccacaggcaggacttcctccaaccctcttgtcccctgttgctttccgaggtgccacaatgcaaatgcttaaggcacggagtgtgaatgtgaagacacaagctctttctggatacagagaccaatttagtttggagattacaggtcctatcatgcctcattctctgcattcactgaccatgctgctcaaatcttcacagagtggatctttctctgcagtactgtatccacacgagccaactgctgtatttaacatctgcctgcaaatggacaaagtacttgatatggaggttgttcataaggagcttactaactgtggtttgcaccctaacactctggagcaacttagtcaaataccgttacttgggaaatcatctttacggaatgtggtgctgagagactacatttataattggagatcctgaacaccaaagtaagcctaaaaggaatctttgaggaaaaaagccttctagcaaggaaattcaagattcttgaagttgaaggaatatactgaaatgtttataaacataacttttactacagtagcatctaaggttttaaatgtgttttactattttcagattagatttttagatataaagatgaaaaactcagataactcaaatgagatatctatatccctacaacctaattgtatattgagcagaaactgaattaatatgcttccttgcaaatgggaaatcacatagcagttaccccatggcattgtgactaatggcatcagggcaaaaatatgttactttacgatttacctgttagcaggttcttgtttcataaaggtagaaaataaatacagacaacatctaaaaaaaaaaaaaaaaaaaa

SEQ ID NO: 601 - DNA, 60 bp, Homo sapiens
tgaggaaaaaagccttctagcaaggaaattcaagattcttgaagttgaaggaatatactg

SEQ ID NO: 602 - DNA, 3334 bp, Homo sapiens
gcacgagccccgggctgccggcgcgggcgccgcggcacgtccacaggctgggtcgcgaggtggcgatcgctgagaggcaggagggccgaggcgggcctgggaggcggcccggaggtggggcgccgctggggccggcccgcacgggcttcatctgagggcgcacggcccgcgaccgagcgtgcggactggcctcccaagcgtggggcgacaagctgccggagctgcaatgggccgcggctggggattcttgtttggcctcctgggcgccgtgtggctgctcagctcgggccacggagaggagcagcccccggagacagcggcacagaggtgcttctgccaggttagtggttacttggatgattgtacctgtgatgttgaaaccattgatagatttaataactacaggcttttcccaagactacaaaaacttcttgaaagtgactactttaggtattacaaggtaaacctgaagaggccgtgtcctttctggaatgacatcagccagtgtggaagaagggactgtgctgtcaaaccatgtcaatctgatgaagttcctgatggaattaaatctgcgagctacaagtattctgaagaagccaataatctcattgaagaatgtgaacaagctgaacgacttggagcagtggatgaatctctgagtgaggaaacacagaaggctgttcttcagtggaccaagcatgatgattcttcagataacttctgtgaagctgatgacattcagtcccctgaagctgaatatgtagatttgcttcttaatcctgagcgctacactggttacaagggaccagatgcttggaaaatatggaatgtcatctacgaagaaaactgttttaagccacagacaattaaaagacctttaaatcctttggcttctggtcaagggacaagtgaagagaacactttttacagttggctagaaggtctctgtgtagaaaaaagagcattctacagacttatatctggcctacatgcaagcattaatgtgcatttgagtgcaagatatcttttacaagagacctggttagaaaagaaatggggacacaacattacagaatttcaacagcgatttgatggaattttgactgaaggagaaggtccaagaaggcttaagaacttgtattttctctacttaatagaactaagggctttatccaaagtgttaccattcttcgagcgcccagattttcaactctttactggaaataaaattcaggatgaggaaaacaaaatgttacttctggaaatacttcatgaaatcaagtcatttcctttgcattttgatgagaattcattttttgctggggataaaaaagaagcacacaaactaaaggaggactttcgactgcattttagaaatatttcaagaattatggattgtgttggttgttttaaatgtcgtctgtggggaaagcttcagactcagggtttgggcactgctctgaagatcttattttctgagaaattgatagcaaatatgccagaaagtggacctagttatgaattccatctaaccagacaagaaatagtatcattattcaacgcatttggaagaatttctacaagtgtgaaagaattagaaaacttcaggaacttgttacagaatattcattaaagaaaacaagctgatatgtgcctgtttctggacaatggaggcgaaagagtggaatttcattcaaaggcataatagcaatgacagtcttaagccaaacattttatataaagttgcttttgtaaaggagaattatattgttttaagtaaacacatttttaaaaattgtgttaagtctatgtataatactactgtgagtaaaagtaatactttaataatgtggtacaaattttaaagtttaatattgaataaaaggaggattatcaaattcatatatgataaaagtgaatgttctaagtctctcaaactagcgttttatgtaataatatgtaatataaataaaactatggtaaatgtgacaagcatttaataggaaaatgctaaggaggcctcataaatgacccataattaccaacgtagaatttttcagtacatttagggttgctggatttagcaaataaaaataaagattgcccagttagatttgaatttcagataaacaattagttttttaatattttacatggaatatttggaaaatacttatactaaaaaattatttgtttgaaattcacatttaactgggagtcttgtattttatctggcaatcctaaaatacattggtatgaaacaaatcacttttagaagtatattgctattttgattgggttgtttttgtgtgtagaaacgtacaataacaactcaaaggcacaggagatttctaaacattgtgaaaagttgaatagattatatatttattctcataatactttcactaatactaaataaaatttggggaacactttttatttttatataatttccaatttacagaaaagtttcaaaaatagtacaaagagctctcttacccagattcactaattgttcatacgtgctttatctttcatgctttctctgtacacacacacacacacacaaatttttcctcaatcatttgaaagtcagttataggcatcatgccccttaaaccctaaatacttcagtgtgtaatactgaataattactaaaaatgattttctcagaaaaaaaaactcccacaattctggaactataatactgtaagccttagaataaataatactttcaagttccaatctaaagttctttttgagttttgttgcccgttttatgcttgatgtgtatagtaatagggtaggctatttattttattaaaattttttttagagacaaggttttgctgtgttgcccaagctggaacttgaacgactgggctgaagtgatcttcccacctcagcctcccaagtagctgggaatacaggtgtctgccaccatacccagtttcatttttgttttttatacccgaagttcatttcctttgtctccctaaaactgaactgtaattttgggaggttttcattagtggaagctcttcatttataaagctatttgaaggggtttaggaatttatatcacatggtaattgtagagaaaaagaagctatatacctcaaaatcgtgccctctttacatatgtcttatcaggtataacatgttgaaatgtcacattagtagtaaagtggggtttatttatatagtggttaagaaatgtcagtttacactgctgtatacttcttcttctgtgtccctaaggcctggtacagtgccaagcacatacttggtatccaataaatatttgttggatgaaaaaaaaaaaaaaaaaaaa

SEQ ID NO: 603 - DNA, 60 bp, Homo sapiens
aggtcctacctatattccaaatactttcactcccttcactttacagcaagggtcagtaga

SEQ ID NO: 604 - DNA, 360 bp, Homo sapiens
gtgagttttcaatttttttcctgtggtctggaataatttaaatagcattagaattatttgtttgttaaaagttagctaggacaaagtgtaaaacaatctaatcctgatgacacttttaatagtagatttttaatcagctttgtgatttctttaatagttattggtttattcaggctttttattaaaaaggtatatacattctctgtgacatacaaagttaaaagttctctattattgctgattgtactggttgttgcttgttgactgtactattcagatggctttatgcttttgtgtattttatgtcacctagatctaattctgaaaacattgtaataaaataattagctataatggtaa

SEQ ID NO: 605 - DNA, 60 bp, Homo sapiens
gtattttatgtcacctagatctaattctgaaaacattgtaataaaataattagctataat

SEQ ID NO: 606 - DNA, 3998 bp, Homo sapiens
ccgggagcccgggcgccctggagtgaggaggaccgggagctggctctggaggctgcggaggcgacgccggagagaacgaagcctcggctgggagcggatctttcgaagatggtttggctgccttggagatttggagatctgatgccacgatgaggactcacacacggggggctcccagtgtgtttttcatatatttgctttgctttgtgtcagcctacatcaccgacgagaacccagaagttatgattcccttcaccaatgccaactacgacagccatcccatgctgtacttctccagggcagaagtggcggagctgcagctcagggctgccagctcgcacgagcacattgcagcccgcctcacggaggctgtgcacacgatgctgtccagccccttggaatacctccctccctgggatcccaaggactacagtgcccgctggaatgaaatttttggaaacaacttgggtgccttggcaatgttctgtgtgctgtatcctgagaacattgaagcccgagacatggccaaagactacatggagaggatggcagcgcagcctagttggttggtgaaagatgctccttgggatgaggtcccgcttgctcactccctggttggttttgccactgcttatgacttcttgtacaactacctgagcaagacacaacaggagaagtttcttgaagtgattgccaatgcctcagggtatatgtatgaaacttcatacaggagaggatggggatttcaatacctgcacaatcatcagcccaccaactgtatggctttgctcacgggaagcctagtcctgatgaatcaaggatatcttcaagaagcctacttatggaccaaacaagttctgaccatcatggagaaatctctggtcttgctcagggaggtgacggatggctccctctatgaaggagttgcgtatggcagctacaccactagatcactcttccaatacatgtttctcgtccagaggcacttcaacatcaaccactttggccatccgtggcttaaacaacactttgcatttatgtatagaaccatcctgccagggtttcaaaggactgtggctattgcggactcaaattacaactggttttatggtccagaaagccaattagtgttccttgataaatttgtcatgcgtaatggcagtggtaactggctagctgaccaaatcagaaggaaccgtgtggtggaaggtccaggaacaccatccaaagggcagcgctggtgcactctgcacacagaatttctctggtatgatggcagcttgaaatcggttcctcctccagactttggcacccctacactgcattattttgaagactggggtgtcgtgacttatggaagtgcactacctgcagaaatcaatagatctttcctttccttcaagtctggaaaactggggggacgtgcaatatatgacattgtccacagaaacaaatacaaagattggatcaaaggatggagaaattttaatgcagggcatgaacatcctgatcaaaactcatttacttttgctcccaatggtgtgcctttcattactgaggctctgtacgggccaaagtacaccttcttcaacaatgttttgatgttttccccagctgtgtcaaagagctgcttttctccctgggtgggtcaggtcacagaagactgctcatcaaaatggtctaaatacaagcatgacctggcagctagttgtcaggggagggtggttgcagcagaggagaaaaatggggtggttttcatccgaggagaaggtgtgggagcttataacccccagctcaacctgaagaatgttcagaggaatctcatcctcctacatccacagctgcttctccttgtagaccaaatacacctgggagaggagagtcccttggagacagcagcgagcttcttccataatgtggatgttccttttgaggagactgtggtagatggtgtccatggggctttcatcaggcagagagatggtctctataaaatgtactggatggacgatactggctacagcgagaaagcaacctttgcctcagtgacatatcctcggggctatccctacaacgggacaaactatgtgaatgtcaccatgcacctccgaagtcccatcaccagggcagcttacctcttcatagggccatctatagatgttcagagcttcactgtccacggagactctcagcaactggatgtgttcatagccaccagcaaacatgcctacgccacatacctgtggacaggtgaggccacaggacagtctgcctttgcacaggtcattgctgatcgtcacaaaattctgtttgaccggaattcagccatcaagagcagcattgtccctgaggtgaaggactatgctgctattgtggaacagaacttgcagcattttaaaccagtgtttcagctgctggagaagcagatactgtcccgagtccggaacacagctagctttaggaagactgctgaacgcctgctgagattttcagataagagacagactgaggaggccattgacaggatttttgccatatcacagcaacagcagcagcaaagcaagtcaaagaaaaaccgaagggcaggcaaacgctataaatttgtggatgctgtccctgatatttttgcacagattgaagtcaatgagaaaaagattagacagaaagctcagattttggcacagaaagaactacccatagatgaagatgaagaaatgaaagaccttttagattttgcagatgtaacatacgagaaacataaaaatgggggcttgattaaaggccggtttggacaggcacggatggtgacaactacacacagcagggccccatcactgtctgcttcctataccaggttgttcctgattctgaacattgctattttctttgtcatgttggcaatgcaactgacttatttccagagggcccagagcctacatggccaaagatgtctttatgcagttcttctcatagatagctgtattttattatggttgtactcttcttgttcccaatcacagtgttagcactgaagctataaattacctggtcattttgtgatcacaagagtctatgcaaaaaaaaaaatttctttaccccagattatcagatttttttccctcagattcattttaacaaattaagggaagatattttgacacaagaaagcaggaacgtggagaaattggagcaggaaaagaaattatcaaagcaatagaaatagcttggtggtcctatggtgtttttggaagtatttggcattgctaattgagcagtccatatagtactacttttagaagaaacaaaaagtctattttttaaagtaatgttttttcttatgagaaaaaggtttagatagaattgggttttattaatattaatttaatgctattagcaatttccatatactatattgtggaaaagactgaagaatacaattctgagaaatataaaaaaattttaatggtatactcatgttgaaagataaatgttgctaagtcctggtatgatggtgtgagcttccttggggaagtacttcttgagttatgtaactaacaggatgttttactacagatctggatggctattcagataacatggcaaaaaatgatagcagaagatcattaaaaacttaaaatatattttattagaaaacatttatctatgaatgaatatttccttgatgctggtctctgcacacatatgcttggttacttgcatgcattcattggttgttcaataagtgagatgattacagataatactgtattttccttatatggaaaaccgttatagacccaataacaactaaacctttcaaaagaaaatattttctattatgaatgttgattttcataccaaagaagatggagagtctaaaatttggatatgattcttatgtttttttaatagaaaaccttcttcaagtttattttcctaaataaacatcataattgtgaaaaaaaaaaaaaaaaaaaaaaaaaaaaaaaaaaaaaaaa

SEQ ID NO: 607 - DNA, 60 bp, Homo sapiens
ttaatggtatactcatgttgaaagataaatgttgctaagtcctggtatgatggtgtgagc

SEQ ID NO: 608 - DNA, 1261 bp, Homo sapiens
agctgatcatacagttgaccagttcagggtgcccgctgctggttggatgccaggcggaatgtcagggtgttctctggtgtctgttgtggctgtgggatccacggttactgggcggagccctgtggtggctgtggtgccatggaggggctgcgatcttctgtggagctggaccctgagctgactccagggaagctggatgaggagatggtggggctgccaccccatgacgcgagtcctcaagtcactttccacagcctcgatgggaagacagtggtgtgtccacacttcatgggcttactgctgggtctcttacttttattgactttgtctgttaggaaccaactctgtgtaagaggtgaaaggcagcttgcagaaacactgcattcacaggtgaaggagaaatcccagctcattggcaagaaaacagattgtagagactgaggcatctttaaaagatgtcagggtacagaaaaagtctttcaacacccccggctttgtagatgcctacaagaaggtgaatagcaccaacgagatgctgatggagaaatttaccaccctcgttcaagaactgaaagaagagacatcctccagactctccaggcaacaagaggagctggtagagatgctaacaacgctggaggccctgggagaggccatgagagccaccccgtcacaaggagcttttccacacctgccatgcagctgagagccaagccctgctgctctctcccccacgagggggctgggtcttagagcagcactgttcttttcccctccacccaggcctcccgagctgccaggctctgtgctcccacactgactccatctgaggggtccttgaggccagtggatctggagtaccccgcccctggcctggagttcctcctccttctcacgctgacactgcagccagctcctcaatgggcggtgcctccaaatctaaagaatatggaggtcctggagcacaccaagaaatgagggactttttctttgcagaaagtttgaattctgtcttaatgagacagaatgccatacttgagcacctcatcttttgctcaaattgaaatgtcatcgaactgtatttctcaagtcaatggtctgtaaatatgatttatgtattaatctcctaagtgaacaatttatattttatcctctacataattatcgtattatgctttaaatatatatttagtttatcaataaagacattcagtactcaaaaaaaaaaaaaaaaaaaaaaaaaaaaaaaaaaaaaaaaaaa

SEQ ID NO: 609 - DNA, 60 bp, Homo sapiens
cttgagcacctcatcttttgctcaaattgaaatgtcatcgaactgtatttctcaagtcaa

SEQ ID NO: 610 - DNA, 2254 bp, Homo sapiens
gggaattctgaaagccgctggcggaccgcgcgcagcggccagagaccgagccctaaggagagtgcggcgcttcccgaggcgtgcagctgggaactgcaactcatctgggttgtgcgcagaaggctggggcaagcgagtagagaagtggagcgtaagccaggggcgttgggggccgtgcgggtcgggcgcgtgccacgcccgcggggtgaagtcggagcgcggggcctgctggagagaggagcgctgcggaccgagtaatggcaatgcagatgcagcttgaagcaaatgcagatacttcagtggaagaagaaagctttggcccacaacccatttcacggttagagcagtgtggcataaatgccaacgatgtgaagaaattggaagaagctggattccatactgtggaggctgttgcctatgcgccaaagaaggagctaataaatattaagggaattagtgaagccaaagctgataaaattctggctgaggcagctaaattagttccaatgggtttcaccactgcaactgaattccaccaaaggcggtcagagatcatacagattactactggctccaaagagcttgacaaactacttcaaggtggaattgagactggatctatcacagaaatgtttggagaattccgaactgggaagacccagatctgtcatacgctagctgtcacctgccagcttcccattgaccggggtggaggtgaaggaaaggccatgtacattgacactgagggtacctttaggccagaacggctgctggcagtggctgagaggtatggtctctctggcagtgatgtcctggataatgtagcatatgctcgagcgttcaacacagaccaccagacccagctcctttatcaagcatcagccatgatggtagaatctaggtatgcactgcttattgtagacagtgccaccgccctttacagaacagactactcgggtcgaggtgagctttcagccaggcagatgcacttggccaggtttctgcggatgcttctgcgactcgctgatgagtttggtgtagcagtggtaatcactaatcaggtggtagctcaagtggatggagcagcgatgtttgctgctgatcccaaaaaacctattggaggaaatatcatcgcccatgcatcaacaaccagattgtatctgaggaaaggaagaggggaaaccagaatctgcaaaatctacgactctccctgtcttcctgaagctgaagctatgttcgccattaatgcagatggagtgggagatgccaaagactgaatcattgggtttttcctctgttaaaaaccttaagtgctgcagcctaatgagagtgcactgctccctggggttctctacaggcctcttcctgttgtgactgccaggataaagcttccgggaaaacagctattatatcagcttttctgatggtataaacaggagacaggtcagtagtcacaaactgatctaaaatgtttattccttctgtagtgtattaatctctgtgtgttttctttggttttggaggaggggtatgaagtatctttgacatggtgccttaggaatgacttgggtttaacaagctgtctactggacaatcttatgtttccaagagaactaaagctggagagacctgacccttctctcacttctaaattaatggtaaaataaaatgcctcagctatgtagcaaagggaatgggtctgcacagattctttttttctgtcagtaaaactctcaagcaggtttttaagttgtctgtctgaatgatcttgtgtaagggtttggttatggagtcttgtgccaaacctactaggccattagcccttcaccatctacctgcttggtctttcattgctaagactaactcaagataatcctagagtcttaaagcatttcaggccagtgtggtgtcttgcgcctgtactcccagcactttgggaggccgaggcaggtggatcgcttgagccaggagttttaagtccagcttggccaagatggtgaaatcccatctctacaaaaaatgcagaacttaatctggacacactgttacacgtgcctgtagtcccagctactctatagcctgaggtgggagaatcacttaagcctggaaggtggaagttgcagtgagtcgagattgcactgctgcattccagccagggtgacagagtgagaccatgtttcaaacaagaaacatttcagagggcaagtaaacagatttgattgtgaggcttctaataaagtagttattagtagtg

SEQ ID NO: 611 - DNA, 60 bp, Homo sapiens
ctattggaggaaatatcatcgcccatgcatcaacaaccagattgtatctgaggaaaggaa

SEQ ID NO: 612 - DNA, 1884 bp, Homo sapiens
gacgtgaacggtcgttgcagagattgcgggcggctgagacgccgcctgcctggcacctaggagcgcagcggagccccgacaccgccgccgccgccatggagtccgagaccgaacccgagcccgtcacgctcctggtgaagagccccaaccagcgccaccgcgacttggagctgagtggcgaccgcggctggagtgtgggccacctcaaggcccacctgagccgcgtctaccccgagcgtccgcgtccagaggaccagaggttaatttattctgggaagctgttgttggatcaccaatgtctcagggacttgcttccaaagcaggaaaaacggcatgttttgcatctggtgtgcaatgtgaagagtccttcaaaaatgccagaaatcaacgccaaggtggctgaatccacagaggagcctgctggttctaatcggggacagtatcctgaggattcctcaagtgatggtttaaggcaaagggaagttcttcggaacctttcttcccctggatgggaaaacatctcaaggcctgaagctgcccagcaggcattccaaggcctgggtcctggtttctccggttacacaccctatgggtggcttcagctttcctggttccagcagatatatgcacgacagtactacatgcaatatttagcagccactgctgcatcaggggcttttgttccaccaccaagtgcacaagagatacctgtggtctctgcacctgctccagcccctattcacaaccagtttccagctgaaaaccagcctgccaatcagaatgctgctcctcaagtggttgttaatcctggagccaatcaaaatttgcggatgaatgcacaaggtggccctattgtggaagaagatgatgaaataaatcgagattggttggattggacctattcagcagctacattttctgtttttctcagtatcctctacttctactcctccctgagcagattcctcatggtcatgggggccaccgttgttatgtacctgcatcacgttgggtggtttccatttagaccgaggccggttcagaacttcccaaatgatggtcctcctcctgacgttgtaaatcaggaccccaacaataacttacaggaaggcactgatcctgaaactgaagaccccaaccacctccctccagacagggatgtactagatggcgagcagaccagcccctcctttatgagcacagcatggcttgtcttcaagactttctttgcctctcttcttccagaaggccccccagccatcgcaaactgatggtgtttgtgctgtagctgttggaggctttgacaggaatggactggatcacctgactccagctagattgcctctcctggacatggcaatgatgagtttttaaaaaacagtgtggatgatgatatgcttttgtgagcaagcaaaagcagaaacgtgaagccgtgatacaaattggtgaacaaaaaatgcccaaggcttctcatgtctttattctgaagagctttaatatatactctatgtagtttaataagcactgtacgtagaaggccttaggtgttgcatgtctatgcttgaggaacttttccaaatgtgtgtgtctgcatgtgtgtttgtacatagaagtcatagatgcagaagtggttctgctggtacgatttgattcctgttggaatgtttaaattacactaagtgtactactttatataatcaatgaaattgctagacatgttttagcaggacttttctaggaaagacttatgtataattgctttttaaaatgcagtgctttactttaaactaaggggaactttgcggaggtgaaaacctttgctgggttttctgttcaataaagttttactatgaatgaccctgaaaaaaaaaaaaaaaaaaaaaa

SEQ ID NO: 613 - DNA, 60 bp, Homo sapiens
gaagagctttaatatatactctatgtagtttaataagcactgtacgtagaaggccttagg

SEQ ID NO: 614 - DNA, 2500 bp, Homo sapiens
cccaggcgcagccaatgggaagggtcggaggcatggcacagccaatgggaagggccggggcaccaaagccaatgggaagggccgggagcgcgcggcgcgggagatttaaaggctgctggagtgaggggtcgcccgtgcaccctgtcccagccgtcctgtcctggctgctcgctctgcttcgctgcgcctccactatgctctccctccgtgtcccgctcgcgcccatcacggacccgcagcagctgcagctctcgccgctgaaggggctcagcttggtcgacaaggagaacacgccgccggccctgagcgggacccgcgtcctggccagcaagaccgcgaggaggatcttccaggagcccacggagccgaaaactaaagcagctgcccccggcgtggaggatgagccgctgctgagagaaaacccccgccgctttgtcatcttccccatcgagtaccatgatatctggcagatgtataagaaggcagaggcttccttttggaccgccgaggaggttgacctctccaaggacattcagcactgggaatccctgaaacccgaggagagatattttatatcccatgttctggctttctttgcagcaagcgatggcatagtaaatgaaaacttggtggagcgatttagccaagaagttcagattacagaagcccgctgtttctatggcttccaaattgccatggaaaacatacattctgaaatgtatagtcttcttattgacacttacataaaagatcccaaagaaagggaatttctcttcaatgccattgaaacgatgccttgtgtcaagaagaaggcagactgggccttgcgctggattggggacaaagaggctacctatggtgaacgtgttgtagcctttgctgcagtggaaggcattttcttttccggttcttttgcgtcgatattctggctcaagaaacgaggactgatgcctggcctcacattttctaatgaacttattagcagagatgagggtttacactgtgattttgcttgcctgatgttcaaacacctggtacacaaaccatcggaggagagagtaagagaaataattatcaatgctgttcggatagaacaggagttcctcactgaggccttgcctgtgaagctcattgggatgaattgcactctaatgaagcaatacattgagtttgtggcagacagacttatgctggaactgggttttagcaaggttttcagagtagagaacccatttgactttatggagaatatttcactggaaggaaagactaacttctttgagaagagagtaggcgagtatcagaggatgggagtgatgtcaagtccaacagagaattcttttaccttggatgctgacttctaaatgaactgaagatgtgcccttacttggctgattttttttttccatctcataagaaaaatcagctgaagtgttaccaactagccacaccatgaattgtccgtaatgttcattaacagcatctttaaaactgtgtagctacctcacaaccagtcctgtctgtttatagtgctggtagtatcaccttttgccagaaggcctggctggctgtgacttaccatagcagtgacaatggcagtcttggctttaaagtgaggggtgaccctttagtgagcttagcacagcgggattaaacagtcctttaaccagcacagccagttaaaagatgcagcctcactgcttcaacgcagattttaatgtttacttaaatataaacctggcactttacaaacaaataaacattgttttgtactcacggcggcgataatagcttgatttatttggtttctacaccaaatacattctcctgaccactaatgggagccaattcacaattcactaagtgactaaagtaagttaaacttgtgtagactaagcatgtaatttttaagttttattttaatgaattaaaatatttgttaaccaactttaaagtcagtcctgtgtatacctagatattagtcagttggtgccagatagaagacaggttgtgtttttatcctgtggcttgtgtagtgtcctgggattctctgccccctctgagtagagtgttgtgggataaaggaatctctcagggcaaggagcttcttaagttaaatcactagaaatttaggggtgatctgggccttcatatgtgtgagaagccgtttcattttatttctcactgtattttcctcaacgtctggttgatgagaaaaaattcttgaagagttttcatatgtgggagctaaggtagtattgtaaaatttcaagtcatccttaaacaaaatgatccacctaagatcttgcccctgttaagtggtgaaatcaactagaggtggttcctacaagttgttcattctagttttgtttggtgtaagtaggttgtgtgagttaattcatttatatttactatgtctgttaaatcagaaattttttattatctatgttcttctagattttacctgtagttcataaaaaaaaaaaaaaaaaaaaaaaaa

SEQ ID NO: 615 - DNA, 60 bp, Homo sapiens
ggtagtattgtaaaatttcaagtcatccttaaacaaaatgatccacctaagatcttgccc

SEQ ID NO: 616 - DNA, 1330 bp, Homo sapiens
gcagcccagccaagcactgtcaggaatcctgtgaagcagctccagctatgtgtgaagaagaggacagcactgccttggtgtgtgacaatggctctgggctctgtaaggccggctttgctggggacgatgctcccagggctgttttcccatccattgtgggacgtcccagacatcagggggtgatggtgggaatgggacaaaaagacagctacgtgggtgacgaagcacagagcaaaagaggaatcctgaccctgaagtacccgatagaacatggcatcatcaccaactgggacgacatggaaaagatctggcaccactctttctacaatgagcttcgtgttgcccctgaagagcatcccaccctgctcacggaggcacccctgaaccccaaggccaaccgggagaaaatgactcaaattatgtttgagactttcaatgtcccagccatgtatgtggctatccaggcggtgctgtctctctatgcctctggacgcacaactggcatcgtgctggactctggagatggtgtcacccacaatgtccccatctatgagggctatgccttgccccatgccatcatgcgtctggatctggctggccgagatctcactgactacctcatgaagatcctgactgagcgtggctattccttcgttactactgctgagcgtgagattgtccgggacatcaaggagaaactgtgttatgtagctctggactttgaaaatgagatggccactgccgcatcctcatcctcccttgagaagagttacgagttgcctgatgggcaagtgatcaccatcggaaatgaacgtttccgctgcccagagaccctgttccagccatccttcatcgggatggagtctgctggcatccatgaaaccacctacaacagcatcatgaagtgtgatattgacatcaggaaggacctctatgctaacaatgtcctatcagggggcaccactatgtaccctggcattgccgaccgaatgcagaaggagatcacggccctagcacccagcaccatgaagatcaagatcattgcccctccggagcgcaaatactctgtctggatcggtggctccatcctggcctctctgtccaccttccagcagatgtggatcagcaaacaggaatacgatgaagccgggccttccattgtccaccgcaaatgcttctaaaacactttcctgctcctctctgtctctagcacacaactgtgaatgtcctgtggaattatgccttcagttcttttccaaatcattcctagccaaagctctgactcgttacctatgtgttttttaataaatctgaaataggctactggtaa

SEQ ID NO: 617 - DNA, 60 bp, Homo sapiens
cctagccaaagctctgactcgttacctatgtgttttttaataaatctgaaataggctact

SEQ ID NO: 618 - DNA, 3268 bp, Homo sapiens
gccggggaagtcatgctcgcttcacggaggcaatagctagccggtgtctgtgggaggttatgtttatttgagacttctccatcgggatcgcctggtgtcaccaagtgtccactggtactgaggtttgctgcctgccttcttgccatgtctaacgaagtagaaacaagtgcaaccaatggtcagcccgaccaacaggccgcaccaaaagcaccctcaaagaaggaaaaaaagaaaggccctgaaaagacagatgaatatctcctagcaaggttcaaaggcgatggcgtaaaatataaggccaagctgattggcattgatgatgtgccagatgcaagaggggataaaatgagccaagactctatgatgaaactaaagggaatggcggcacgtggtcggtctcagggacaacacaaacaaaggatctgggtcaacatttccctttctgggataaaaataattgatgagaaaactggggtaatagagcatgaacatccagtaaataagatttctttcattgcccgtgatgtgacagacaaccgggcatttggttacgtgtgtggaggagaaggccagcatcagttttttaccataaaaaccgggcaacaggctgaaccattagttgttgatcttaaagacctttttcaagttatctataatgtaaagaaaaaggaagaagaaaagaaaaagatagaggaagccagcaaagcagttgagaatgggagtgaggccctaaggattctagatgaccaaactaacaaactgaaatcgggtgttgaccagatggatttgtttggggacatgtctacacctcctgacctaaatagtccaacagaaagcaaagatatcctgttagtggatctaaactctgaaatcgacaccaatcagaattctttaagagaaaatccattcttaacaaacggcatcacctcctgttctcttcctcgaccaacgcctcaggcatccttcttgcctgaaaatgccttttctgccaatctcaacttctttcccacccctaatcctgatcctttccgtgacgatcctttcacacagccagaccaatcgacaccttcttcgtttgattctctcaaatctccagatcagaagaaagagaattcgagtagctcgtctactccgctgagtaatgggcccctgaatggtgatgttgactactttggtcagcaatttgaccagatctctaaccggactggcaaacaggaagctcaggcaggcccatggcccttttcaagttcgcaaacccagccagcagtgagaactcaaaatggggtatctgaaagagaacagaacggcttctctgtcaaatcctccccgaacccttttgtgggaagccctcccaaaggactgtccatacagaatggcgtaaagcaggacttggaaagctctgtccagtcctcaccacatgactccatagccattatcccacctccacaaagtaccaaaccaggaagaggcagaaggactgctaagtcttcagccaatgacttgcttgcatcagacatctttgctcctcccgtctcagaaccttcaggccaggcgtcacccacaggacaacctacagccctgcagcccaaccctctggatctcttcaaaacaagtgctcctgccccagtggggcccctggtgggtctaggtggtgtaactgtcacactccctcaggcaggaccatggaacacagcatctttggtcttcaatcagtccccttcaatggctccgggagccatgatgggtggtcaaccttcaggttttagtcagcccgtcatttttggtacaagtccagctgtttcaggttggaaccagccttcaccctttgcagcctcaactccccctccagtgcctgttgtctggggcccttctgcatctgtggcacccaatgcttggtcaacaacaagccctttggggaatccttttcagagcaatatttttccagctcctgctgtgtccactcagcccccatccatgcactcctctctcctggtcactcctcctcagccacctcccagagctggccctcccaaggacatctccagtgatgccttcactgccttagacccacttggggataaagagatcaaggatgtgaaagaaatgtttaaggatttccaactgcggcagccacctgctgtgcccgcgcggaagggagagcagacttcttctgggactttgagtgcctttgccagttatttcaacagcaaggttggcattcctcaggagaatgcagaccatgatgactttgatgctaatcaactattgaacaagatcaatgaaccaccaaagccagctcccagacaagtttccctgccagttaccaaatctactgacaatgcatttgagaaccctttctttaaagattcttttggttcatcacaagcctctgtggcttcttctcaacctgtatcttctgagatgtatagggatccatttggaaatccttttgcctaaattctgaacttggtctgcagaccatccagaggaataaaaaggttggccttagtagtcaaaaacaaagctgatagccagacacgttctgatttctgcccttgttccagctttgacgtattatctgttgccttatttctcattgcctcttctacttgtaaaatgcttttcactttctgtctaggttaaagctaaactgaatctatggctttaaataaattaagatcctaaactctctagcttaagtgtaaatgaagtacagtagtttccctactgaaccctacctcttgtgtccctggaaccttctagaacacctgccttctaccctctggttgggagatgcagccaccacatcccttcatatcatactgttttgaataaattttcaaatccttattgttcagagttgtttgggggttctgtttcagagcataaaacctaaaggttatagtagaacaaggcaccttcttaaaagaaatcttgcttcagaccatcagttacagagaatttcctaaagtaaaattgaagcaactacaacttctccttagacactttggaatctaaccacttaaggacctttttaaagagatagcttctcttctttctgaagatcaatttctcccaaggccaagattgtccttttctcccatttcttgctagctattgcaaatgagggaagaacattattcatctctcctccccttttttttctgattcttttttcagtcagttttgctcctgggttcaagtagtattaccaccctttcacaagcaacagactctcacagggcaaaaaaaaaaaaaaaaaaaaaaa

SEQ ID NO: 619 - DNA, 60 bp, Homo sapiens
tctccttagacactttggaatctaaccacttaaggacctttttaaagagatagcttctct

SEQ ID NO: 620 - DNA, 409 bp, Homo sapiens
ctgtgctatgatctaaagcctctcatatctgtgcagcaacctggggtgagtcactgtcactaacatggaacagatgccaggtagtccctttggacaaaaggatgaggcccatccatgtagaaagcatcttaatcagtgactgtcttatgggccctctttgtttcccatctgttttattatcagaatatataattttcccccaagttttcatcttgaatctctcaaacctacagaaaatttgaaatttgacagtaagcacctgtatatccttcctctagtttgtcttattgttgacattttatcatgtatgctttatagacaggatttttcctgaaccatttggaatatgcatatacttcatccctcagttcccagcatgtaccctaagaataaagattttcttctgcat

SEQ ID NO: 621 - DNA, 60 bp, Homo sapiens
aacctacagaaaatttgaaatttgacagtaagcacctgtatatccttcctctagtttgtc

SEQ ID NO: 622 - DNA, 370 bp, Homo sapiens
  misc_feature 21: n = A,T,C or G
ttttttttttttttttttaanaaaaattcattatttatttataattacatgtacatacatatatgcatttgaatatctagaagaaactaccatttgcaatctcttttccatggttctaacctacttggaacataaccaagtgacaacatacaaacaagttctagattctaaacctgttttccactgcactgtaactgggggatgggactcagcaacagtgactccataagccagcaaatgattttcacctagagggagcaccagacttccaagagttattgggatgtgggaggggaacactagtttggaaaaaagaccttaaatgattttgatacttctccctacagtatatatgcttccccctcgtgcc

SEQ ID NO: 623 - DNA, 60 bp, Homo sapiens
tgttccaagtaggttagaaccatggaaaagagattgcaaatggtagtttcttctagatat

SEQ ID NO: 624 - DNA, 1409 bp, Homo sapiens
aattaagagaaaaaaagtgaatatggtttttgctcacagaatggataacagcaagccacatttgattattcctacacttctggtgcccctccaaaaccgcagctgcactgaaacagccacacctctgccaagccaatacctgatggaattaagtgaggagcacagttggatgagcaaccaaacagaccttcactatgtgctgaaacccggggaagtggccacagccagcatcttctttgggattctgtggttgttttctatcttcggcaattccctggtttgtttggtcatccataggagtaggaggactcagtctaccaccaactactttgtggtctccatggcatgtgctgaccttctcatcagcgttgccagcacgcctttcgtcctgctccagttcaccactggaaggtggacgctgggtagtgcaacgtgcaaggttgtgcgatattttcaatatctcactccaggtgtccagatctacgttctcctctccatctgcatagaccggttctacaccatcgtctatcctctgagcttcaaggtgtccagagaaaaagccaagaaaatgattgcggcatcgtggatctttgatgcaggctttgtgacccctgtgctctttttctatggctccaactgggacagtcattgtaactatttcctcccctcctcttgggaaggcactgcctacactgtcatccacttcttggtgggctttgtgattccatctgtcctcataattttattttaccaaaaggtcataaaatatatttggagaataggcacagatggccgaacggtgaggaggacaatgaacattgtccctcggacaaaagtgaaaactatcaagatgttcctcattttaaatctgttgtttttgctctcctggctgccttttcatgtagctcagctatggcacccccatgaacaagactataagaaaagttcccttgttttcacagctatcacatggatatcctttagttcttcagcctctaaacctactctgtattcaatttataatgccaattttcggagagggatgaaagagactttttgcatgtcctctatgaaatgttaccgaagcaatgcctatactatcacaacaagttcaaggatggccaaaaaaaactacgttggcatttcagaaatcccttccatggccaaaactattaccaaagactcgatctatgactcatttgacagagaagccaaggaaaaaaagcttgcttggcccattaactcaaatccaccaaatacttttgtctaagttctcattctttcaattgttatgcaccagagattaaaaagctttaactataaaaacagaagctatttacatatttgttttcactcaactttccaagggaaatgttttattttgtaaaatgcattcatttgtttactgt

SEQ ID NO: 625 - DNA, 60 bp, Homo sapiens
agttcttcagcctctaaacctactctgtattcaatttataatgccaattttcggagaggg

SEQ ID NO: 626 - DNA, 2233 bp, Homo sapiens
gggacggcgacagcgggtcggcgggccgcaggagggggtcatgggtaaagactactaccagacgttgggcctggcccgcggcgcgtcggacgaggagatcaagcgggcctaccgccgccaggcgctgcgctaccacccggacaagaacaaggagcccggcgccgaggagaagttcaaggagatcgctgaggcctacgacgtgctcagcgacccgcgcaagcgcgagatcttcgaccgctacggggaggaaggcctaaaggggagtggccccagtggcggtagcggcggtggtgccaatggtacctctttcagctacacattccatggagaccctcatgccatgtttgctgagttcttcggtggcagaaatccctttgacaccttttttgggcagcggaacggggaggaaggcatggacattgatgacccattctctggcttccctatgggcatgggtggcttcaccaacgtgaactttggccgctcccgctctgcccaagagcccgcccgaaagaagcaagatcccccagtcacccacgaccttcgagtctcccttgaagagatctacagcggctgtaccaagaagatgaaaatctcccacaagcggctaaaccccgacggaaagagcattcgaaacgaagacaaaatattgaccatcgaagtgaagaaggggtggaaagaaggaaccaaaatcactttccccaaggaaggagaccagacctccaacaacattccagctgatatcgtctttgttttaaaggacaagccccacaatatctttaagagagatggctctgatgtcatttatcctgccaggatcagcctccgggaggctctgtgtggctgcacagtgaacgtccccactctggacggcaggacgatacccgtcgtattcaaagatgttatcaggcctggcatgcggcgaaaagttcctggagaaggcctccccctccccaaaacacccgagaaacgtggggacctcattattgagtttgaagtgatcttccccgaaaggattccccagacatcaagaaccgtacttgagcaggttcttccaatatagctatctgagctccccaaggactgaccagggacctttccagagctcaaggatttctggacctttctaccagttgtggaccatgagagggtgggagggcccagggagggctttcgtactgctgaatgttttccagagcatatattacaatctttcaaagtcgcacactagacttcagtggtttttcgagctatagggcatcaggtggtgggaacagcaggaaaaggcattccagtctgccccactgggtctggcagccctcccgggatgggcccacatccacctccagtccctggccaggggtgagaggcagaccagcagatggacttgatccctctgtgtctttgggcttctggctggtagataatgtcaacctgcagtcttgattcccagaccctgtacactcctccttttctgttgtgtgatcagtttgtgctttattctgtatttgtctcccatgtcttgctcttctcctggagaattctgtcttctctttggccatctcaaattgagaacctaaactattcctgcagaactgcctggttggcgtccacaagcaatacctctcgttccagcaggaccaagggagccagcctccagtgagtgactccagcaagtgcagccacctctcccttgatggtctgggagcctggcctcagcaaggggccttcctgacctctggctccagtgaagctgaatgtcctcactttgtgggtcacactctttacatttctgtaaggcaatcttggcacacgtggggcttaccagtggcccaggtaattttttgtttcatggactatggactctttcaaagggatctgatccttttgaattttgcacagccctagatacaatcccttttgataaaagggtctttgcttctgattacaggagcactgtggaacgtctgtaaatatgtttttataattccatgtatagttggtgtacactcaaaacctgtccccggcagccagtgctctctgtatagggccataatggaattctgaagaaatcttggggagggaaggggagttggaacaaatgtctgttccctggaggccagtccagtgctcagacctttagactcattgtaagttgccactgccaacatgagaccaaagtgtgtgactagtcaatgaagtgcgacagcattaaagactgatgctaaacctc

SEQ ID NO: 627 - DNA, 60 bp, Homo sapiens
ttcatggactatggactctttcaaagggatctgatccttttgaattttgcacagccctag

SEQ ID NO: 628 - DNA, 1925 bp, Homo sapiens
gcggccgtcgcgtctgacagaccactgcagaccacgggccgaggcccagcgcccgtccgcagcgcggccggcatggcggcgacaaggagccccacgcgggcaagggagcgggagcggtctggcgctcccgccgcaggaagtgaccaagttcactcctggatgctagctacaagccaagccttagacactgtctggagaatggcaaaaggctttgtgatgttggcagtttcatttctggtggctgccatctgctacttccggaggctacatttatattcagggcacaagctgaaatggtggattggatatctgcagagaaaattcaaaaggaacctcagtgtggaggcagaggttgatttactcagttattgtgcaagagaatggaaaggagagacaccccgtaacaagctgatgaggaaggcttatgaggagctattttggcggcatcacattaaatgtgttcgacaagtaaggagagataactatgatgctctcagatcagtgttatttcagatattcagccagggcatctcttttccatcatggatgaaagaaaaggacattgttaagcttcctgaaaaactgctgttttcacaaggttgtaattggattcagcagtacagttttggtcctgagaagtatacaggctcgaatgtgtttggaaaactacggaaatatgtggaattattgaaaacacagtggactgaatttaatggcattagagattatcacaagagaggaagtatgtgcaacacccttttttcagatgccattctggaatataaactttatgaagctttaaagttcatcatgctgtatcaagtcactgaagtttatgaacaaatgaagactaaaaaggtcattcccagtctttttagactcctgttttccagggagacatcctctgatcctttgagcttcatgatgaatcacctgaattctgtaggcgacacatgtggactagagcagattgatatgtttatacttggatactcccttgaagtaaagataaaagtgttcagactgttcaagtttaactccagagactttgaagtctgctacccagaggagcctctcagggactggccggagatctccctgctgaccgagaacgaccgccactaccacattccagtcttttaagtccgctgggggccgaacagcagtgctcaccagtgacggtggtcacagttgcaataaagtctctctctgaaaccaaagctagcatttcagcatggaaggaattaggaccttttcttcaggattacaggtacactggatgcagccatgcatggatggtttttctttatttttcagtgatttcctctgaagcagctgcactgatacatttgggagttggtggcttgactttgtccataaggggcgtggccacttcacatgatggcgggcctttaagagcacaaagaagtttaatatggacaacaacaggaaaaagcaagaagaaaacaagtagggaaaaacagctaacctggagagaaagaatttctttaacctttatgttcttcattaaaaatcttatcttggactgatttgagggatttttagaaacatggccttattttatataagcattaccttcccaggaatctttgttgtatattaatttttgataaccatttgattaactttaaaattaagtatatgtgtgtatatatacatatgtatgtttatatacacacatgtatctgtatagttttatatatacatatatacacatagacatacagagaaccactactttgtaatagtgtacagtttgttttatatctctttactttttttgttactattttatctggccagcgtaatagttttatttagattttttaaaattctgtagattaaagcaaatgacagttattgaactatcacaaaactattaaactgtggtacatttaatgtgt

SEQ ID NO: 629 - DNA, 60 bp, Homo sapiens
acaagtagggaaaaacagctaacctggagagaaagaatttctttaacctttatgttcttc

SEQ ID NO: 630 - DNA, 3592 bp, Homo sapiens
ctgagcgggtgcgcgggcaacttccggtgtgggtgacgagtggtggccgaagcagggggacagcaagggacgctcaggcggggaccatggcggacggcggctcggagcgggctgacgggcgcatcgtcaagatggaggtggactacagcgccacggtggatcagcgcctacccgagtgtgcgaagctagccaaggaaggaagacttcaagaagtcattgaaacccttctctctctggaaaagcagactcgtactgcttccgatatggtatcgacatcccgtatcttagttgcagtagtgaagatgtgctatgaggctaaagaatgggatttacttaatgaaaatattatgcttttgtccaaaaggcggagtcagttaaaacaagctgttgccaaaatggttcaacagtgctgtacttatgttgaggaaatcacagaccttcctatcaaacttcgattaattgatactctacgaatggttaccgaaggcaagatttatgttgaaattgagcgtgcgcgactgactaaaacattagcaactataaaagaacaaaatggtgatgtgaaagaggcagcctccattttacaggagttacaggtggaaacctacgggtcaatggaaaagaaagagcgagtggaatttattttggagcaaatgaggctctgcctagctgtgaaggattacattcgaacacaaatcatcagcaagaaaattaacaccaaatttttccaggaagaaaatacagagaaattaaagttgaagtactataatttaatgattcagctggatcaacatgagggatcctatttgtctatttgtaagcactacagagcaatatatgatactccctgtatacaggcagaaagtgaaaaatggcagcaggctctgaagagtgttgtactctatgttatcctggctccttttgacaatgaacagtcagatttggttcaccgaataagtggtgacaagaagttagaagaaattcccaaatacaaggatcttttaaagctttttaccacaatggagttgatgcgttggtccacacttgttgaggactatggaatggaattaagaaaaggttcccttgagagtcctgcaacggatgtttttggttctacagaggaaggtgaaaaaaggtggaaagacttgaagaacagagttgttgaacataatattagaataatggccaagtattatactcggataacaatgaaaaggatggcacagcttctggatctatctgttgatgagtccgaagcctttctctcaaatctagtagttaacaagaccatctttgctaaagtagacagattagcaggaattatcaacttccagagacccaaggatccaaataatttattaaatgactggtctcagaaactgaactcattaatgtctctggttaacaaaactacgcatctcatagccaaagaggagatgatacataatctacaataagggtcttagtgctttagaaaaaagttaaaattggaagtcattaaaaaaagactgttataatggtgtatatgttggggttttttttctaagcttctttgtcttaaattttaaaatagtgaatatgtttgagactccctttgacctttcagttccccaagttcattgttaactttgcatttgcaattggtgcaaaaatacagatttctgtcgtctgaatacacaaaaagttgtgtcataacttacccagatatgtttttctatcatttgaaacctttttagctactgtttgttttcattcaactaacaaacatattccaataataaaagcagtatatacatatttcctttctacagttacctctgattctcaacattttgtggggtagtgatttggcaagtgttttttaaataaaacaaatctcattgtaaagctatcagtcatttagtagaatagaaaagcaacatagagcatacaagaacatttgggatagagttgtgatttgtgaagaatttgtactttgatattgtggcggaaagtctagactgagtgtgtatgctggtaaactgtagacttttttttttttttttttgagtccggctggttccaatcacagtagcttgattgctttcagccctcatcctctcacttgatcagttgttcaacagaatcagctgacataattgacacagtttattgggtgttaagtccgctctatagggatagtgactactttttttttttttttttttttgctcttcttcctctcccctttctttatatgggtttaaatttaacataaagttgtttttataaggcttatttgtggctttaacttgtaagtctgattacatcattattgttccaaattcattatctctgtaggaacttttagttccattatatgaacactggataacctaattttttttaatgctttaaaaaaatggcaaaaagacgtcaggccaccctcatagtaagtggtgtagtattaaaatattttcacggaattaaaagtagcttgctgtcaaagaaacacctgagatgaattggtgtgaacgaattttgcaagtttaatttgatttatttcagagaaaatagaaaaaacaatgttagaaggttatttaaaatgatacttaaataaagaaagtgtgaggtctactttaaaaaaattcaaatgaagagaaaaagaaaaacagcattctagaaatggcatttctcctaattaattttccacttaatggaagattatcaattgtcctattttatgatcccaggactgaagacagttgtgggatatctgtcatatttatcctgtgagtcattgtgaataatgacatacagtactgaagtaatctgattttattctttggaaattcaatgcattggtcacactaataacatcaacatctgctatcacttatctttttaaaactaaccaaaaaaggctgggattacaggcatgagccactgcacccaactcctctttcgtctttctttaacacacactaggctctttgtgtattatgattcagtgctatttgtaactgtgtcccagtgaccaaattgcactcgactcgatcagctgttcatccatttcgtgttttttcctgtcaaacattaatccagcaaatatatgaggtatttaccaatttattttcttagtattacaaaataattcattagcataaagtacaatagtgaaatatttgagttgttcggaacctcaattaatcctgttttacatttcagacctaaagctggcaatcaggagaagaagcactttgttttaaatgtggagaagataacacttgattccatttcattgtcattagtgtattaaccagcaggagaggtgatgagccatttttcaaatgaaataccttttatttccatataatttttttattttagagttcaatagctgtttctatgattatcctcaatttccatatgttactgaatctgaaaaacatctttaaaattcaaacagttccattttctctcttgtaagtgttaaatgtgataaaagtacatattttaaattgttttcagctcttggatatagcagcaataaaaacactaatttgtgggtatttaagaaaacctggagaataaactcatactttaaaagatc

SEQ ID NO: 631 - DNA, 60 bp, Homo sapiens
aaatgtggagaagataacacttgattccatttcattgtcattagtgtattaaccagcagg

SEQ ID NO: 632 - DNA, 1536 bp, Homo sapiens
acagagcttcaaaaaaagagcgggacagggacaagcgtatctaagaggctgaacatgaatccacagatcagaaatccgatggagcggatgtatcgagacacattctacgacaactttgaaaacgaacccatcctctatggtcggagctacacttggctgtgctatgaagtgaaaataaagaggggccgctcaaatctcctttgggacacaggggtctttcgaggccaggtgtatttcaagcctcagtaccacgcagaaatgtgcttcctctcttggttctgtggcaaccagctgcctgcttacaagtgtttccagatcacctggtttgtatcctggaccccctgcccggactgtgtggcgaagctggccgaattcctgtctgagcaccccaatgtcaccctgaccatctctgccgcccgcctctactactactgggaaagagattaccgaagggcgctctgcaggctgagtcaggcaggagcccgcgtgacgatcatggactatgaagaatttgcatactgctgggaaaactttgtgtacaatgaaggtcagcaattcatgccttggtacaaattcgatgaaaattatgcattcctgcaccgcacgctaaaggagattctcagatacctgatggatccagacacattcactttcaactttaataatgaccctttggtccttcgacggcgccagacctacttgtgctatgaggtggagcgcctggacaatggcacctgggtcctgatggaccagcacatgggctttctatgcaacgaggctaagaatcttctctgtggcttttacggccgccatgcggagctgcgcttcttggacctggttccttctttgcagttggacccggcccagatctacagggtcacttggttcatctcctggagcccctgcttctcctggggctgtgccggggaagtgcgtgcgttccttcaggagaacacacacgtgagactgcgcatcttcgctgcccgcatctatgattacgaccccctatataaggaggcgctgcaaatgctgcgggatgctggggcccaagtctccatcatgacctacgatgagtttgagtactgctgggacacctttgtgtaccgccagggatgtcccttccagccctgggatggactagaggagcacagccaagccctgagtgggaggctgcgggccattctccagaatcagggaaactgaaggatgggcctcagtctctaaggaaggcagagacctgggttgagcagcagaataaaagatcttcttccaagaaatgcaaacagaccgttcaccaccatctccagctgctcacagacaccagcaaagcaatgtgctcctgatcaagtagattttttaaaaatcagagtcaattaattttaattgaaaatttctcttatgttccaagtgtacaagagtaagattatgctcaatattcccagaatagttttcaatgtattaatgaagtgattaattggctccatatttagactaataaaacattaagaatcttccataattgtttccacaaacact

SEQ ID NO: 633 - DNA, 60 bp, Homo sapiens
tgctcacagacaccagcaaagcaatgtgctcctgatcaagtagattttttaaaaatcaga

SEQ ID NO: 634 - DNA, 2066 bp, Homo sapiens
gtactccttggttcatgccagtgttcctgcacccagcactgaagctgaacattgacagtgatttgcccctgccccagagtcctccctgcattcccctcgagggcccccgtctcctggccctggtgtccacttttctctcagctgctgggaacgtgttagtgtgcactgttctcctttccctcacctgctggcttcatgttagcatgcaccgttctgctcactttcttcccctcacctgccgggatcatcttagcatgcaccattctgctcactttcttcctctcacctgccaggatcatgtaagcgtgcaccgttctccacactttcttcctctcacctgccgggatcacgttagcatgcaccattctgcacacttccttcccctcatctgccagggtcatcttagcatgcaccattctgctcacttcaccttcttcttctcgcctgctgggatcatgttagtgtgcactgttctgcacactttcttcctctcccctgctgggatcatgttagtgtgcaccgttctgcacactttcttcctctcacctgctgggatcatcttagcatgcaccattctgctcactttcttcctgtcacctgctgggatcatgttggcgtgcaccattctgcacactttcttcctctcgcctgctgggatcatgttagcgtgcacagttctgcatacttgcttcccctcacctgccaggaacaggttagtgttccccattctgcacactttcttcctctcacctgccgggatcatgttagcgtacaccattctgcacactttcttcctctgtgtacgtgtgtgtggttttcctttcagaaatgggtcatactctgtggacatctttttccacttaaagtgatggcacagccattttcccagtcaagtaacatgaatgtacaagtttagcaaacttcctcctgagagatggagagatcaaggcttctgctccgtggcagccatccgtgcacatgcatcactgtgcgtgagttggtcccagtggcttgctgagacatgctctgcacaggggagatttcttataccagcagtgtgggaggcagtggggcaggtagagccacaagtggggatgagggagcagagtctagggcaggctcctggatggacaccagctacactgtctattggatgtgggacttccctcactgatgaaatgaataagagaatcttcctcatcctgctgttgttggcgttaaaacgggttaatgcatgaaagcaacaaagcccggcctgcagacagcacctggtaagtctcctcttcccagcatgttcaacaggaagccctcattccctctagaatgtaggagtcttgccagcagtggcctgtttgttctctgcctgttgccgacctgatgagaacataaaattggtgtcttctgtatagatttccttcttattgcccctactgtggctgaacataccttcccccgtgcttgaagtctgttcatatatgttctgctgtgataactgcccattcttgttctctatctaagaaggcatttagttttgaaaatattttgttggcttgtaagatatttgtacatattaagcacagcaaacctgtaacatattcactgtaaatcattattcctcatgcatcatttgccatttaactgtatttttttccttcttgatgtaacctgctatagtttacatttttaaatcagaaatgcctgcacattttaaaacgaagactcttatgctctagcctttgaggtcatgcttggaaagtcctttctcacacaaagattatttacactttcatctctttttctctgagtacgtttcagtgtttaattgaccaggaatgtatttcgaggtgtgatatgagacaaggatctgaaatgcttcgcccactgaatcatcatgcactgaccgaaatgccacctgtatgagtgctaaaatcattgtcgctggacctgtgtctgcactgtttaattttagtgttgtttctcacatcagcttctgttgttttcatggttgtggttctcatacttttaatatctgttggagcaaataaagcctcgtttctcatcttttc

SEQ ID NO: 635 - DNA, 60 bp, Homo sapiens
gtggagtaggttgaggtgtagccatgacattctggaaactacattttttgtaatagtcat

SEQ ID NO: 636 - DNA, 5728 bp, Homo sapiens
ctacgatccaggctggagttgcgctcggccggtctgagcgctggcgctgcccggacgccgcggggtccccgccagcccagggcactcggcgcggggatctgcgcgcctcgctctcccttcccgatgccgccgcccggctgctgatcgccgcaccaccttccctcatcggcttgggtccgtggaggtccctgcagaggcaggaagcctccttaggaaagcagggatggaggtaaattgtttaacactaaaagacctgatcagccccaggcagcccagactagattttgcagttgaagatggggaaaatgcacaaaaggaaaatatatttgttgatcgatcaaggatggccccgaagactccaataaaaaatgaaccaattgatttatcgaagcaaaaaaaatttactccagaaagaaatcccattactccagttaagcttgttgacagacagcaagcggaaccatggacacccacagctaacctgaagatgctcattagtgctgccagcccagatataagggaccgggagaagaaaaagggactattccgacccattgaaaacaaggacgatgcatttacagattctctacagcttgatgttgttggggacagtgctgtggacgaatttgaaaagcaaaggccaagcagaaaacagaaaagtttaggactcctgtgccagaagtttctagctcgctatccaagttatcccttgtcaactgagaaaactaccatctccctagatgaagttgctgtcagtcttggtgtggaaaggagacgcatctatgacattgtaaatgtgctggagtcgctgcatctggtcagccgggtggctaagaatcagtatggctggcatggacggcacagcctgccaaaaaccctgaggaacctccagagactaggagaggagcagaaatatgaagagcaaatggcctacctccaacagaaagagctggacctgatagattataaatttggagaacgtaaaaaagatggtgatccagattcccaggaacaacagttactggatttctctgaacccgactgtccctcttcatctgcaaacagtagaaaagacaagtctctgagaattatgagccagaagtttgtcatgctgttcctcgtctccaaaaccaagattgtcactctggatgtggctgccaaaatactgatagaagaaagccaagatgccccggaccatagtaaatttaaaacaaaggtacgacgcctctatgacatagccaatgttctgaccagcttggctctgataaagaaagtgcatgtaacagaagagcgaggtcgtaaaccagccttcaagtggatcgggcctgtggacttcagctcaagtgatgaagaactggtggatgtttctgcatctgtcttaccagaattgaaaagagaaacatatggccagattcaagtctgtgcaaaacagaagctggctcgccatggttcttttaacacagttcaggcttctgagaggatccagaggaaagtgaactcagaaccgagcagcccgtacagagaagaacaaggatcaggtggctactctttagaaattggaagcctggcagctgtctatagacagaaaatagaagacaattcacagggaaaagcctttgccagtaagagagtggtgcctccatcaagcagcttggaccctgttgctcctttccctgtcctctctgttgacccagaatattgtgttaatcctttagcccacccagtattttctgttgctcagacggacctgcaggcattctccatgcagaacggtctgaatggacaagtggatgtctcacttgcttctgcagcctctgctgtggagagcctgaagccagcactccttgctggccagcctctagtgtatgtgccctctgcctcactgttcatgctgtatggaagtctgcaggagggaccagcgtcagggtcagggtcagagagggatgacagaagctcagaagccccagccacagtagagctgtcatctgcaccctcagctcagaagcgcctctgtgaggagaggaaacctcaggaggaggatgagccagccactaaaaggcaaagtagggaatatgaagacggcccgctgtcgcttgtcatgcccaagaaaccctcagattccacagaccttgcctctcccaagactatgggtaacagggcatctatacccctcaaagacattcatgtgaatggccaactccctgctgcagaagagatttcaggaaaggcaacagcaaactctcttgtttcttctgagtggggaaatccttcaagaaatacagatgttgaaaagccttcaaaagaaaatgaaagcaccaaagagccttctttgctacaatatctttgtgtgcagtctcctgcaggattaaatggtttcaatgtacttttatctggcagtcaaaccccccctactgtgggcccgtcctcaggtcagctgccgtctttcagtgtcccttgcatggtcttaccatctccacctctgggcccttttcctgttctctattctcctgcaatgccgggcccggtttcttctactcttggtgctctcccaaacacaggacctgtgaatttcagcttgcctggccttggatcaatagcccagcttctcgtcggccccacagctgtggttaatccaaagtcgtccacactcccttctgcagaccctcagcttcagagtcagccctcactaaacctaagtccagtgatgtcaaggtcacacagtgtcgtccaacaacctgagtcccccgtttacgtgggacatccagtctcagtagtaaaattacatcagtcaccagttccagtgacccccaagagcatccaacgcacacatcgtgagacgtttttcaagacacccggcagccttggagaccctgtcctgaagagaagagaaaggaaccagtcacgaaacaccagctcggcccagaggagactagaaatccccagcggcggcgctgactaacctgccgctttgccaggtgggggtgggatcaaacgccctgagagtcccggatgtccgaggcgggatgcaaaccatcccgtcctgagcacgggtccttcctctctctttcatccacacttctgttaacttcccaccaccatcaatcatctgatttcctgaaagtaattaattgtgcatttaataccagttagagttccgactctgcatggtgtcacagtgaaagcgccgactgacttatggttttgattcaagaatcgtcttattctggaagtagatctgaataggctaccggagccttgtttttctaaaggggggcgctgtctagcacttaactagggtaagcattcttaacatgtatttccacttgccctgagtaaatctgtggtgagagaagcttcctttctgcagtttaaaaaagctactgcttccttaggcttcatcaggaagccaccttcagttgtgaatcctatggtgttatttattttgttcctgaaatgggatttagtgcaaaaagtttacaactacagtctttaacacatttttttcagggtatgacgacttgaatgtttatacttttattctataatttgccctgcacttattttacaacctagtaataatgtggataaatgtatctacatgacacatgtcaagaccaaaataactgtgaatgacacaccttgctgtaaatgaactgtgctaaccctgactgtgggcttgagaacaaagatgaactctagaactctagcagcctaactgctgcttctcaaataactgtgtgaacagtgagatattactgtttgtttctaaaaatcctactgtgcccagtttccttcactacatgccctgcattttttatttaaatatttagctgtagcgccatcagatatggatgccttctaacaattgctgtttgtaaaataaatcaggatggtagaaagtgattatatggaaaattggaacctggatgagaccttttcgttgaattctgaagagtaatgatgtgaaaattgatacagggcaagagatgattcttttgtttttcttctacttcatgtccagaagagtaagagggaaaatggacatatgtttcatatccaagggtattcaaactgtagttagttggtacctctgaaaaatgagaatggtgagcgcacgggttggttgttctagcatgaatacaattctggaaactgttatgcaatttcccttttttaacccacattactttaggggtgcattaagtcgccaaactatactagttctttgtattcctagacttgctgatatttacctctctcttgtctcttcagagtaaatggttcccttctttccttcctactttccttcattctctcttccttccctccttcctacttcttttcttccttcctcttcctctcttaaaactatcttagatgtagaatcctggtgtagggttttattttatttttattttttgacccaataaaatgttatatgaaagaatgaaaatattaatttaagagactctgggagtctgaataaagtagctttatattaactacaggataatattagccttattacccccacaagattttttaaaacttgaggtaggtagctacattaaataaatttgctacttatataaaaatttttatcaacactaaacttttaaagtttacaagttttttttttcttttttacagtcttctatagagttaggttaaaaatgtggttctaaccatcaacaattgcatggttaaatgaccctgaactaaaactgatgggttccctatcaaaacaaataaaaatatacctttttcaggtttcaatctgtgcagggtatatgcatgttaattctaccatgcttaagaacttccacaaaatatttcatggagaggtctgcatttagacggaaacagaaattgcttttcccctcactgttcctgaatgctctatacttgttttaacatttttgctatctttttttattattctgatcatgatatgaccatttaacctcagaattcataattcctgaggggtgttaagaagcagtcccattggtgaggatattatgacttggtgaccattcttaggagtagaaaaccaaggacaattgcttctgtattcagtatccacttcttaatgtggctttatatgtaaaaataataatgcagtggttgtttctgtcaggaaaataaatcttacagaacaactggtggaattgaagctgctgcgctagacttggatattttgggtagtgaagaagcaatggcaatcttgagtctattattgtataatttagtaaaagaaaaaaataatcgttggtggtcctactaagagaatgcagcttttttgagttgtcacagaggctgtgtgtgccctacactgaccagggtttgtaaaaccctttcattctggtacaagagtcgggggtataacttttatacttgaatctacctaccaagtttacatttctcaattcctttttgtaaggtgctatttctgtatttaaataactttcttttaacgtaaagctgctttctgcttatcttattgcactgctagttgtatgtaggtattaattttattgctgcttactgcttttgttttcttattatttagctctgctctttttcctaatggctatattatctatagctatttacttgtaactgtactacatgtaaactgattttttgttctgattttttttctaatatttttaggaaaatattaagctttataaaatagcaataaaaaataattcatttaagaaaa

SEQ ID NO: 637 - DNA, 60 bp, Homo sapiens
attctggtacaagagtcgggggtataacttttatacttgaatctacctaccaagtttaca

SEQ ID NO: 638 - DNA, 2492 bp, Homo sapiens
ccgcgcgattccgagggggttaacggcggagccgccggccgggcgcggaccggagcgcgtgaggctccggcgcgcaagcccggagcagcccgctggggcgcacagggtcgcgcgggcgcggggatggaggacggcgtggccggtccccagctcggggccgcggcggaggcggcggaggcggccgaggcgcgagcgcggcccggggtgacgctgcggcccttcgcgcccctctcgggggcggccgaggcggacgagggcggcggcgactggagcttcattgactgcgagatggaggaggtggacctgcaggacctgcccagcgccaccatcgcctgtcacctggacccgcgcgtgttcgtggacggcctgtgccgggccaaatttgagtccctctttaggacgtatgacaaggacatcacctttcagtattttaagagcttcaaacgagtcagaataaacttcagcaaccccttctccgcagcagatgccaggctccagctgcataagactgagtttctgggaaaggaaatgaagttatattttgctcagaccttacacataggaagctcacacctggctccgccaaatccagacaagcagtttctgatctcccctcccgcctctccgccagtgggatggaaacaagtggaagatgcgaccccagtcataaactatgatctcttatatgccatctccaagctggggccaggggaaaagtatgaattgcacgcagcgactgacaccactcccagcgtggtggtccatgtatgtgagagtgatcaagagaaggaggaagaagaggaaatggaaagaatgaggagacctaagccaaaaattatccagaccaggaggccggagtacacgccgatccacctcagctgaactggcacgcgacgaggacgcattccaaatcatactcacgggaggaatcttttactgtggaggtggctggtcacgacttcttcggaggtggcagccgagatcggggtggcagaaatcccagttcatgttgctcagaagagaatcaaggccgtgtccccttgttctaatgctgcacaccagttactgttcatggcacccgggaatgacttgggccaatcactgagtttgtggtgatcgcacaaggacatttgggactgtcttgagaaaacagataatgatagtgttttgtacttgttcttttctggtaggttctgtctgtgccaagggcaggttgatcagtgagctcaggagagagcttcctgtttctaagtggcctgcaggggccactctctactggtaggaagaggtaccacaggaagccgcctagtgcagagaggttgtgaaaacagcagcaatgcaatgtggaaattgtagcgtttcctttcttccctcatgttctcatgtttgtgcatgtatattactgatttacaagactaacctttgttcgtatataaagttacaccgttgttgttttacatcttttgggaagccaggaaagcgtttggaaaacgtatcacctttcccagattctcggattctcgactctttgcaacagcacttgcttgcggaactcttcctggaatgcattcactcagcatccccaaccgtgcaacgtgtaacttgtgcttttgcaaaagaagttgatctgaaattcctctgtagaatttagcttatacaattcagagaatagcagtttcactgccaacttttagtgggtgagaaattttagtttaggtgtttgggatcggacctcagtttctgttgtttcttttatgtggtggtttctatacatgaatcatagccaaaaacttttttggaaactgttggttgagatagttggttcttttaccccacgaagacatcaagatacacttgtaaataaagctgatagcatatattcatacctgttgtacacttgggtgaaaagtatggcagtgggagactaagatgtattaacctacctgtgaatcatatgttgtaggaaaagctgttcccatgtctaacaggacttgaattcaaagcatgtcaagtggatagtagatctgtggcgatatgagagggatgcagtgcctttccccattcattcctgatggaattgttatactaggttaacatttgtaatttttttctagttgtaatgtgtatgtctggtaaataggtattatattttggccttacaataccgtaacaatgtttgtcattttgaaatacttaatgccaagtaacaatgcatgctttggaaatttggaagatggttttattctttgagaagcaaatatgtttgcattaaatgctttgattgttcatatcaagaaattgattgaacgttctcaaaccctgtttacggtacttggtaagagggagccggtttgggagagaccattgcatcgctgtccaagtgtttcttgttaagtgcttttaaactggagaggctaacctcaaaatattttttttaactgcattctataataaatgggcacagtatgctccttacgaaaaaaaaaaaaaaa

SEQ ID NO: 639 - DNA, 60 bp, Homo sapiens
aatgccaagtaacaatgcatgctttggaaatttggaagatggttttattctttgagaagc

SEQ ID NO: 640 - DNA, 2668 bp, Homo sapiens
tggaccaatgacagccagtggttttaattaataccattttgaatatctgagttccactggggtaaggggatgaatcaaacaaggcctcagaagaaaagttgtctgggaatgcaggaaggttttgcagaggagatgaagtttcagttgcaaccctgctgcgtgggcttcaatttcaccacctcgtgatccgcccgtctcggcctcccaaagtgctgggactgcaggcgtgagccaccgcgcccggccaacgtcattttcttttcaggagtcccttctgttatttagcaagacacactactacaatggagaaaaaagatgccccctccttcaagccctgagatcttcaggactttggcgaaaagtctgcgcccgaagagacccaggaaggattcttggaattgtagtccaaaggcatcccgccttctgcgcagactcacaagtccctgtggacggaattcttgaagtgtagcgccgctcagtccttccaccggaagtgtccgatcggaatcagccctgtccgagaggtgagtccgggtttggggatccagatgtccagccccgtgtccccctccaaacatccagtccctctcatattgcctttgaaattagcagcctctgggtgaccagaccttggccctcagaggaatcccggagaaaggtagaaccagcttcggcgttgggaacgcaggcgcgcttacgcatttagtgagggtttggcggtctccatagttaccgccgccgcgcgtgacgtcatagtggagcgctgagggcttggtggcgtggggtgggggctgtcctactgatcctgaatttggggtcactggtaagaggagttgcccattccagccaggtggaacggggaggggtgccacatgtctcagatctgccattgtctgcgaaaagaaactgctgcgaggaccatccccaatcccctgcttcccttgggaagagtaaccgccgttttgtaggacacttggggacaaccccgcttgtcctgaaatttattgacacggtaaatagtatttcctgtgtgccgaggatgcagttaaaccaacactgaccccctgcccttgagaaacacaagatggctacagaaccaaagaaagctgcagcccagaactctccagaggatgaaggacttctgatagtgaagatagaagaggaagaatttatccatgggcaggacacttgcttacagagaagtgaactccttaagcaggagctctgcaggcagctttttaggcagttctgctaccaggattctcctggacctcgcgaggcactgagccgcctccgggagctctgctgtcagtggctgaagccagagatccataccaaggaacagattctggaactgctggtgctagagcagttcctgaccatcctgccaggagatttgcaggcctgggtacatgaacattacccagagagtggagaggaggcagtgaccatactagaagatttggagagaggcactgatgaagcagtactccaggttcaagcccatgaacatggacaagaaatattccagaaaaaagtgtcacctcctggaccagcacttaatgtcaagttacagccagtggagaccaaggcccattttgattcatcagaaccccagctcctatgggactgtgataatgagagtgaaaacagtagatccatgccaaagctggaaatttttgaaaaaattgaatcacagagaattatatctggaagaatctcaggatacatatcagaagcatctggtgagtctcaagacatctgtaagtctgcaggcagggtaaagagacaatgggaaaaagaatcaggggagtctcagagactctcgtctgcccaggatgaaggttttggtaaaatcctcacccacaaaaatacagtcagaggtgaaataataagccacgatggatgtgagaggagattaaatctgaactcaaatgaattcacacaccagaaatcttgtaaacatggtacctgtgaccagagcttcaaatggaactcagattttattaaccatcaaataatttatgctggagaaaaaaatcaccaatatggaaaatctttcaagagcccaaaacttgctaaacatgcagcagttttcagtggagataaaactcatcagtgtaatgaatgtgggaaagctttcaggcacagctcaaaacttgctaggcatcagagaatccacactggagagagatgctatgaatgtaatgaatgtgggaaaagctttgcagagagctcagatcttactagacatcggcgaattcacactggggaaagaccctttggttgcaaagaatgtgggagagcattcaacctgaactcacatcttatcaggcatcagagaattcacaccagagagaaaccctacgagtgtagtgaatgtgggaaaaccttccgagtgagctcacatcttattcgacactttagaattcacactggagaaaaaccctatgaatgcagtgagtgtggaagagccttcagtcagagctcaaaccttagtcaacaccagagaattcacatgagggaaaacctattaatgtaaggaacttaaatttgtaagtaaatgctgaggaaatggcacaatatgaaaaatattaaataaaaaataaatattgggcaagatggaagactgaaaaaaaaaaaaaaaaaaaaaaaaaaaaaaaaaaaa

SEQ ID NO: 641 - DNA, 60 bp, Homo sapiens
cccaaaacttgctaaacatgcagcagttttcagtggagataaaactcatcagtgtaatga

SEQ ID NO: 642 - DNA, 4205 bp, Homo sapiens
ctccctcgctccctccctgcgcgccgcctctcactcacagcctcccttccttctttctccctccgcctcccgagcaccagcgcgctctgagctgcccccagggtccctcccccgccgccagcagcccatttggagggaggaagtaagggaagaggagaggaaggggagccggaccgactacccagacagagccggtgaatgggtttgtggtgacccccgccccccaccccaccctcccttcccacccgacccccaacccccatccccagttcgagccgccgcccgaaaggccgggccgtcgtcttaggaggagtcgccgccgccgccacctccgccatggagctgatcaccattctcgagaagaccgtgtctcccgatcggctggagctggaagcggcgcagaagttcctggagcgtgcggccgtggagaacctgcccactttccttgtggaactgtccagagtgctggcaaatccaggaaacagtcaggttgccagagttgcagctggtctacaaatcaagaactctttgacatctaaagatccagatatcaaggcacaatatcagcagaggtggcttgctattgatgctaatgctcgacgagaagtcaagaactatgttttgcagacattgggtacagaaacttaccggcctagttctgcctcacagtgtgtggctggtattgcttgtgcagagatcccagtaaaccagtggccagaactcattcctcagctggtggccaatgtcacaaaccccaacagcacagagcacatgaaggagtcgacattggaagccatcggttatatttgccaagatatagacccagagcagctacaagataaatccaatgagattctgactgccataatccaggggatgaggaaagaagagcctagtaataatgtgaagctagctgctacgaatgcactcctgaactcattggagttcaccaaagcaaactttgataaagagtctgaaaggcactttattatgcaggtggtctgtgaagccacacagtgtccagatacgagggtacgagtggctgctttacagaatctggtgaagataatgtccttatattatcagtacatggagacatatatgggtcctgctctttttgcaatcacaatcgaagcaatgaaaagtgacattgatgaggtggctttacaagggatagaattctggtccaatgtctgtgatgaggaaatggatttggccattgaagcttcagaggcagcagaacaaggacggccccctgagcacaccagcaagttttatgcgaagggagcactacagtatctggttccaatcctcacacagacactaactaaacaggacgaaaatgatgatgacgatgactggaacccctgcaaagcagcaggggtgtgcctcatgcttctggccacctgctgtgaagatgacattgtcccacatgtcctccccttcattaaagaacacatcaagaacccagattggcggtaccgggatgcagcagtgatggcttttggttgtatcttggaaggaccagagcccagtcagctcaaaccactagttatacaggctatgcccaccctaatagaattaatgaaagaccccagtgtagttgttcgagatacagctgcatggactgtaggcagaatttgtgagctgcttcctgaagctgccatcaatgatgtctacttggctcccctgctacagtgtctgattgagggtctcagtgctgaacccagagtggcttcaaatgtgtgctgggctttctccagtctggctgaagctgcttatgaagctgcagacgttgctgatgatcaggaagaaccagctacttactgcttatcttcttcatttgaactcatagttcagaagctcctagagactacagacagacctgatggacaccagaacaacctgaggagttctgcatatgaatctctgatggaaattgtgaaaaacagtgccaaggattgttatcctgctgtccagaaaacgactttggtcatcatggaacgactgcaacaggttcttcagatggagtcacatatccagagcacatccgatagaatccagttcaatgaccttcagtctttactctgtgcaactcttcagaatgttcttcggaaagtgcaacatcaagatgctttgcagatctctgatgtggttatggcctccctgttaaggatgttccaaagcacagctgggtctgggggagtacaagaggatgccctgatggcagttagcacactggtggaagtgttgggtggtgaattcctcaagtacatggaggcctttaaacccttcctgggcattggattaaaaaattatgctgaataccaggtttgtttggcagctgtgggcttagtgggagacttgtgccgtgccctgcaatccaacatcatacctttctgtgacgaggtgatgcagctgcttctggaaaatttggggaatgagaacgtccacaggtctgtgaagccgcagattctgtcagtgtttggtgatattgcccttgctattggaggagagtttaaaaaatacttagaggttgtattgaatactcttcagcaggcctcccaagcccaggtggacaagtcagactatgacatggtggattatctgaatgagctaagggaaagctgcttggaagcctatactggaatcgtccagggattaaagggggatcaggagaacgtacacccggatgtgatgctggtacaacccagagtagaatttattctgtctttcattgaccacattgctggagatgaggatcacacagatggagtagtagcttgtgctgctggactaataggggacttatgtacagcatttgggaaggatgtactgaaattagtagaagctaggccaatgatccatgaattgttaactgaagggcggagatcgaagactaacaaagcaaaaacccttgctacatgggcaacaaaagaactgaggaaactgaagaaccaagcttgatctgttaccattgggatgataacctgaggacccccactggaaatctcccatcttttgaaaaacctggaagtgaggagtgtgcacggatgctgaatgtttgggaatgagaggatgagtgagtgaggcttgaaaacacaccacattgaaaatcctgccacagcagcagccgcagccgccaacagcagcgctgttagtgagctaagtaagcactgacttcgtagaaaaccataacatcggccatcttggaaaagagaaaaacaatggagttacttatttaaaaaaaaagaaagaaagttatctcttcccaggagaggctagaagtagcttttctgtcttttggccagtgccgagtggaatgcctggtttgggggaggaggagggactgggttcagctgtggtgctttgttgtaaaaggcagcctggcctttgctactgaggagaaagatggagcctgggtctcaagcccaccttcgctgtacctttgccacatggtactgtatgcttgccagctagaaggagggtcagggattttttacagtctgagaatgagtgtgtgtgagtgaggcggtatccacattctcaacttcaagtcattgcagtttctttttcccagaaaacaaggggttagatgttgcatttcataaaactaaccgaagttctgtctactgatgcagcacaagagatgtaaaaaaaaaaaaaaaaaaaaaaaaaaaaacacacacacagaggaaagacgctctttaggttttgttttgttttttttttttggttttgttttttgttttttttactctagggaaaacactgacgaatggtcagagctcctatcctgatcttttcatcaaggcgcctttcctaataatatggttcaactgtgaatgtagaagtgggggggaggggggagaaaaagaaaactctggcgttagaggatatagaaaaatataagtacaattgttacaaataacgcagacttcaaaaacaaaaaaatcacaacccaaacaaaccaaaatttaaatgatcagaattggcagcacaaagaaaacgccctctcctgacttgtattgtggcagtctgaacgcccccagaaaattgtgccaaagagtttagaaaaataaatatacaataaaagtaaacacatacacacaaaacagcaaacttcaggtaactattttggattgcaaacaggataaattaaatgttcaaacaatctgataaaataaccatttggaaactgaaaa

SEQ ID NO: 643 - DNA, 60 bp, Homo sapiens
gaagtgtgttagtccaactttaagaaaaatccaaactcatcagcttttgatagcatcttg

SEQ ID NO: 644 - DNA, 1678 bp, Homo sapiens
gcatatactgtcatcatcttggaaagaaaaggctgagaacgtaaaactgaggacagaggaggaaagcagggtgacccctgatgttgccctagaaaatggaaaacaaaacacagcaaaacagaaaaacagaagatctgactctgcctttagccaggaaaacagtttgggggagtaaaaagtattagggaaaagagtgggcattttgcctggaaaaaaggtttctagagccatctgggctttccgggaacctggaccagactctggcccagtaggatgtccccgtgtcctccccagcagagcaggaacagggtgatacagctgtccacttcagagctaggagagatggaactgacttggcaggagatcatgtccatcaccgagctgcagggtctgaatgctccaagtgagccatcatttgagccccaagccccagctccataccttggacctccaccacccacaacttactgcccctgctcaatccacccagattctggcttcccacttcctccaccaccttatgagctcccagcatccacatcccatgtcccagatcccccatactcctatggcaacatggccataccagtctccaagccactgagcctctcaggcctgctcagtgagccgctccaagaccccttagccctcctggacattgggctgccagcagggccacctaagccccaagaagacccagaatccgactcaggattatccctcaactatagcgatgctgaatctcttgagctggaggggacagaggctggtcggcggcgcagcgaatatgtagagatgtacccagtggagtacccctactcactcatgcccaactccttggcccactccaactataccttgccagctgctgagacccccttggccttagagccctcctcaggccctgtgcgggctaagcccactgcacggggggaggcagggagtcgggatgaacgtcgggccttggccatgaagattccttttcctacggacaagattgtcaacttgccggtagatgactttaatgagctattggcaaggtacccgctgacagagagccagctagcgctagtccgggacatccgacgacggggcaaaaacaaggtggcagcccagaactgccgcaagaggaagctggaaaccattgtgcagctggagcgggagctggagcggctgaccaatgaacgggagcggcttctcagggcccgcggggaggcagaccggaccctggaggtcatgcgccaacagctgacagagctgtaccgtgacattttccagcaccttcgggatgaatcaggcaacagctactctcctgaagagtacgcgctgcaacaggctgccgatgggaccatcttccttgtgccccgggggaccaagatggaggccacagactgagctggcccagaggggtggaactgctgatgggatttccttcattcccttctgataaaggtactccccaaccctgagtcccagaaggagctgagttctctagaccagaagaggatgacaatggcaacaagtgtttggaagttccaaggtgtgttcaaagaggcttgccttgagggagggctggaatctgtcttccctgactcggctcctcaggtctttagcctccaccttgtctaagctttggtctataaagtgcgctacagaaaaaaaaaaaaaaaaaaaaaaa

SEQ ID NO: 645 - DNA, 60 bp, Homo sapiens
gatgacaatggcaacaagtgtttggaagttccaaggtgtgttcaaagaggcttgccttga

SEQ ID NO: 646 - DNA, 3193 bp, Homo sapiens
ttttagattttgaaatttagggataatagctcttaggtttgggtaccactttgctgcagtttaagaaagggggaagggaactcatttattaaacatcaatcacgtgctgtgttctgtttgttttctagtcatcatatcacacacctttacgacagctcactgaaggaaggtgatactgttcccattttgtagatggaatagacaaaacctgaatttaagtagcttgctcaaggttccatattgaatatggaaagttcaaatcatctcagtaatgaatataccatatatacttgctgtattgtatctatgataattcagttacccacaatacccttttaaatttctgttaatgacatacctttaaatgtctccttgatgaacagaatcatggtctttaaaaacattttcatgggttgattgcattttcaagctctaaaggattgaaagataaatcttcacgttaaaggtgagagtgaagtatctgctcttgggttacagaaccagatagtactagaactaagattacagggtaaagctgcttttatcttttttctttttctttttcttttttttttgacatggggtctcactgtattgcccaggctggaatgcagtggcatgatctcagctcacggcagcctctgcctcttgggctcaagcgattctcctgcttcagctttccaagtatttgggaccacaggcgcacaccacaggcctggctaatgtttttgttttgtttttggtagagacggggtttcaccatgttgccaggctggtctcgaactcctgagctcaagtgattcacccaccttggcctcacaaagtgtcaggcttacaggcgtgagccactgcgcccggctcacagggtaaggcttctgtctggtgtgttgtattacggattttgcttaataggcacagtgaggcattaaaaagaaaattcagtatgcctgtagaaaggataatccttgtttaaagtctccaaattgcagtcaaagatgttttgactgtgcctttttttgttcccctgctgtcccttatgtagacttctgtcagtacccatggcagcctgtcatcttgttgacatctccttctggactgtgagctctgtatctggcttgtttttcatccccagcttctagttcacaattaggtagaaccctattactctttgaagaaggaacaagaaaatgtgggccagttttcatttgccattcttccatgtgagttagtatggttcgtaagtattcctggtgatacgctagtattggcaattctgtgaggttgaacaaaggggtggtatggtgtgctagcgtgggaattaggagacctctgggtcttgacagtgccctggccactaagcaaaggcagttcatccttggagtctcaatgtgcttttttgttaattgagatatgcttgaagtatcagccctaaatagtctgattctgtgacctacaaacccttacttaattcagtgttactataaatgattcttcccttaaacctactttttacttagcaaaagagaaaaaaaaaaaaaggaaacgctcatgtcaggctgcctgggtttgaaccccagatcccctcttagttggaggcaagttgtatgatgcttcagcttttggttcctgcctcctaaggttgttaggagttactgtgtgtagctgcttagaacattgcctgggtctcagtaagccgcttaagtgactgctctcattttcgctgtaaagcaccatactgtaataacatcccatgaagcatggggcggggaagagtatatggtaccttatggactttgatgtggtggggtagtaggtaaattctgaatatgtaagctacatagtattctttttgtaactaaaggataaaagttttaagatgggcatgtaatatggctagcactggattttaatgatgagccagagtaataaggctggcaaggggagtttttgttttgtaataaatctcttacacctgcacatccagttctttttaaaaacacgtttgaagaggctccatatttctcagtgaagctgttggggttcatgttatttttgaaaatcatcttgcaatttatttcagcatcagactgaaccacccaaagaaaattagtctatttctgaacagttttttcagaaaccatattggtctgatcacccaacatttatagaaataggcgcttaaggcctagaggcatttcagaaaggagaatgagaaatactgtggtcaagagtagtgttcagatggagaacatcaagcatctgctctgcccttccacacacatcctcatttcatcttcacaactgccctaggtaaccttgttatctgtaatggaacagcctcaaggagcacagaggcactcactcctcacgtttggtctgttgccatttccggcttggttggaatagggtaggagccttttggcagggagcacattctcagtaatgcagagtgcactcacctgggttctagcttcaacacttaggatttgcttgatattttgtattctctgaggcactgcctgtatttgtttctgctatcacagtccagagtcaagcttcatttataaagactgggcagggcatggtggctcactcctgtaattccagcactttgggaggctgaggtgggtggatcactttaggtcaggagttcaagaccagcctggccaacatggtgaaaccccatctctactaaaaaatacaaaaaggccgggcacggtggctcacacctgtaatcccaacactttgggaggccaaggtgggcagaacacctgaggtcaggagttcaagaccatcctggcgaacatagtgaaacctcgcctctactaaaaatacaaaaattagccaggtgtggtggtgcatgcctgtaatcccagctacttgggaggctgaggcaggagaattgcttaaacctgggaggtggagattgtggtgagctgagatcgtgccactgcactccagcctgggagatagaacgagactccatctcaaaaaagaacaaaaacaattagccgagcgaggtggtgcacgcctgtaatcccagctactcatgaggctgaggcaggagaatcacttgaacccaggaggaggaggttgtagtgagtcaaggttgcaccactgcactccagcctgggtgacagagtgagactgtctcaaaaaataagtacataaataataagtaaaagctactaac

SEQ ID NO: 647 - DNA, 60 bp, Homo sapiens
ctgtgacctacaaacccttacttaattcagtgttactataaatgattcttcccttaaacc

SEQ ID NO: 648 - DNA, 2943 bp, Homo sapiens
gtgctgcctggcgctggctaggaggcaaacgcacgcgggaagagctgctacccattccagggaccctgccgctgcccctctgaggggtctgcacctcctgggagcaggtgggtctctgggacgagggtccatggtggatggctctggagacgctcccgaggctgtgccgtcccgctgctgcacaggtcggagggtcaccgcagaggctactcgggctggggctggggccgagggagcccgcactggagccccatgtggaacccaaggatgcagctgctctgctaacacggcagcccatccttcgagactgtgacctcgccacagtggccctcagccctccacctccggcgggggcgagggccacccacctccaagtctccagccatgacgacctccgcactccggcgccaggtgaagaacatcgtgcacaactactccgaggcagaaatcaaggtgcgcgaggccaccagcaatgacccctggggcccccctagttcgctcatgtccgagatcgctgacctgaccttcaacacagtggccttcaccgaagtcatgggcatgctgtggcggcggctcaatgacagcggcaagaactggcggcacgtgtacaaggctctaacattgctggactacctgctcaagacgggctccgagcgggtggcccaccagtgccgcgagaacctctacaccatccagacactcaaggacttccagtacatcgaccgcgacggcaaggaccagggcgtcaacgtgcgcgagaaggtcaagcaggtgatggccctgctcaaggatgaggagcggctgcggcaggagcgaacccacgccctcaagaccaaggagcgcatggcactggagggcatcggcattggcagtgggcagctgggcttcagccgccgctacggcgaggactacagccgctcccggggctccccgtcctcctacaactcctcctcttcgtcaccccgctatacctccgacctggagcaggcccggcctcagacgtcaggggaagaggaactgcagctgcagctggccctcgccatgagccgtgaggaggcagagaagcctgtccccccagcctcccacagggacgaggacctgcagctgcagctggctctgcgcctgagccggcaggagcacgagaaggaggtgaggtcctggcagggtgatggctcccccatggccaatggtgcaggggccgtggtccaccatcagcgggacagagagcctgagagagaggagagaaaggaggaggagaagctaaaaaccagccagtcctccatcctggacttggctgacatcttcgtacctgccctggccccgccctccacacactgctctgctgacccatgggacatcccaggttttaggccgaacacagaggccagtggatcctcctgggggccttctgcagacccctggtctccgatcccctcaggaaccgtcctgtcccgaagccagccctgggatctgactcccatgctctcctcctctgagccctggggcaggaccccagtgctgcctgctgggccccccaccacagacccctgggccctgaactctccccactacaaactccccagcactggggctgacccttggggagcctccctggagacctccgacacacctggtggtgcctcgacctttgacccatttgccaaacctccagaatccacagagaccaaggaggggctggagcaggccctgccctctgggaagcccagcagccctgtggagctggacctgtttggagaccccagccccagttccaagcaaaatggcacgaaggagccagatgccctggacctgggcatactaggggaagcactaacccagccaagcaaagaggcccgagcttgccggactcccgagtccttcctgggtccctcagcttcctccttggtcaaccttgactcgttggtcaaggcaccccaggttgcaaagacccggaaccccttcctgacaggtctcagcgctccgtcccccaccaacccgttcggcgcgggcgagacgggcaggccgacgctaaaccagatgcgcaccggctcgccggcgctgggcctggcaggcgggcctgtgggggcgcccctgggctccatgacctacagcgcctctctgcccctcccgctcagcagcgtgccagctggcttgaccctccccgcctcggttagcgtcttcccgcaggccggagccttcgcaccgcagccgctgctgcccacgccgagctcagccgggccgcggcccccgcccccgcagaccggcaccaaccccttcctctgagccccgccccgtcccataccggcctgcgcctgcgccggacgctccgcggccccgcctccggacccggggctgggcggggcgccggtgctagtggaacgccgtgccagtggcggctggtatcccgcggcggctctggaagctggacgcggaccacggcccgggagctagaaactgaacgcccgcataataaagactggaacccacgttctcagctctcaccaagtggactttttgcggggtgtggcggccgggtctcgaccacagcgtggatcaccggctgtttaggaaactgcagctgcacaacgtggggtgcaaaactgccccgcttcctttacagctcttctcaaccctcacctccatcccccgtcacccaggcaccttcgcttccagatgctgccaggctgtcactcaattcggtcatttcattcatttatcacacatgggcactggggttgggctaacagcaagagacaataggcctttgttcctatttattgggtactgcttacgtgctaagcagatcagtttatttaatgcttgcaacgactctctgaggtagaaaatattgttaattccgttcaggatcccggctacataatctgtggggctcaatacaaaataaaaatgtaggggctccttgttcaaaaaaaaaaaaaaaaa

SEQ ID NO: 649 - DNA, 60 bp, Homo sapiens
gcagatcagtttatttaatgcttgcaacgactctctgaggtagaaaatattgttaattcc

SEQ ID NO: 650 - DNA, 2265 bp, Homo sapiens
agtcctgcgatttcgggtgtagagggagcaggggcctgcggggacctggtgtgggtggagtggggacaagcggtggagaagggtacgccagggtcgctgagagactctgttctccctggagggactggttgccatgagagcagccgtctgaggggacgcagcctgcactacgcgccccaagaggctgtgcgtggcgagcaggtcacgtgacgggagcgcgggctttggaaggcggctgaacgtcaggccacccgccgctaagctgagaagggagagcgagcttaggaccgcctgcccggggcaaccccgaaccaagctttagccgccgaggccgcgtgtcccaaaggccagtcatccctcctctgtgttgccatgggaattcaaggcctggccaaactaattgctgatgtggcccccagtgccatccgggagaatgacatcaagagctactttggccgtaaggtggccattgatgcctctatgagcatttatcagttcctgattgctgttcgccagggtggggatgtgctgcagaatgaggagggtgagaccaccagccacctgatgggcatgttctaccgcaccattcgcatgatggagaacggcatcaagcccgtgtatgtctttgatggcaagccgccacagctcaagtcaggcgagctggccaaacgcagtgagcggcgggctgaggcagagaagcagctgcagcaggctcaggctgctggggccgagcaggaggtggaaaaattcactaagcggctggtgaaggtcactaagcagcacaatgatgagtgcaaacatctgctgagcctcatgggcatcccttatcttgatgcacccagtgaggcagaggccagctgtgctgccctggtgaaggctggcaaagtctatgctgcggctaccgaggacatggactgcctcaccttcggcagccctgtgctaatgcgacacctgactgccagtgaagccaaaaagctgccaatccaggaattccacctgagccggattctgcaggagctgggcctgaaccaggaacagtttgtggatctgtgcatcctgctaggcagtgactactgtgagagtatccggggtattgggcccaagcgggctgtggacctcatccagaagcacaagagcatcgaggagatcgtgcggcgacttgaccccaacaagtaccctgtgccagaaaattggctccacaaggaggctcaccagctcttcttggaacctgaggtgctggacccagagtctgtggagctgaagtggagcgagccaaatgaagaagagctgatcaagttcatgtgtggtgaaaagcagttctctgaggagcgaatccgcagtggggtcaagaggctgagtaagagccgccaaggcagcacccagggccgcctggatgatttcttcaaggtgaccggctcactctcttcagctaagcgcaaggagccagaacccaagggatccactaagaagaaggcaaagactggggcagcagggaagtttaaaaggggaaaataaatgtgtttccccattatacctccttcaccccagaatatttgccgtcttgtacccttaagagctacagctagagaaaccttcacggggtggagagaggattctaaggcttttctagcgtgacccttttcagtagtgctagtcccttttttacttgatcttaatggcaagaaggccacagaggtacttttccttttttagctcaggaaaatatgtcaggctcaaaccacttctcaggcagtttaatggacactaagtccattgttacatgaaagtgatagatagcaacaagttttggagaagagagagggagataaaagggggagacaaaagatgtacagaaatgatttcctggctggccaactggtggccagtgggaggtgatggtggacctagactgtgcttttctgtcttgttcagccttgacccaccttgagagagagccaccaggaaggcgcatcttagcagatgggaggaactgctgagagaagatgggcagaaagctggagcccctggagttggctgtgtctgtgtttgtgactgattactggctgtgtcttgggtgggcagaaactcgaacttgctatgtaatttgtgtctagttattcagaggagtaagatggtgatgttcacctggcaatcagctgagttgagactttggaataagacactggttttcatgcgctgtttttgttttaaagttatgaagaaaaaagtcaataaaattctaaaagtaaaaaaaaaaaaaaaaaa

SEQ ID NO: 651 - DNA, 60 bp, Homo sapiens
agcgtgacccttttcagtagtgctagtcccttttttacttgatcttaatggcaagaaggc

SEQ ID NO: 652 - DNA, 60 bp, Homo sapiens
ggttcaacaaactcatctggatacatcattcttgtcacattacttacaaatcaactggtg

SEQ ID NO: 653 - DNA, 3899 bp, Homo sapiens
agcttgagcgcggcggcggcgttgttcagtcagagcgagaacattccagaggtcgcccagctccggcgctgacgggtgtggaccgcggacgtcgctgggacagcccctccccgctgctcggcggcggcatctggcccggccgctcctcgctgcgcttcgcctccgcctcctcggactcggactcgggtttatatcgcgcctcacttcatcccagtcccgggcgagcagcgttgggtttatgtctttatttgacgaaaacgagctgttgcgcagccattggtacctgtattggggaaacatagcatacaagcaagaagcttacagcctcagtggcgaaaattttttcatgtcagagaccgagaactcttgcagtcgtttatgtcatcccttcttctccagacagaagataccaaaaagttgcaatcaaagatctcttcatcttattgataaagccactaataagccaaaatgtctgtcaatgtcaaccgcagcgtgtcagaccagttctatcgctacaagatgccccgtctgattgccaaggttgagggcaaaggcaatggaatcaagacagttatagtcaacatggttgacgttgcaaaggcgcttaatcggcctccaacgtatcccaccaaatattttggttgtgagctgggagcacagacccagtttgatgttaagaatgaccgttacattgtcaatggatctcatgaggcgaataagctgcaagacatgttggatggattcattaaaaaatttgttctctgtcctgaatgtgagaatcctgaaacagatttgcatgtcaatccaaagaagcaaacaataggtaattcttgtaaagcctgtggctatcgaggcatgcttgacacacatcataaactctgcacattcattctcaaaaacccacctgagaatagtgacagtggtacaggaaagaaagaaaaagaaaagaaaaacagaaagggcaaagacaaggaaaatggctccgtatccagcagtgagacaccaccaccaccaccaccaccaaatgaaattaatcctcctccacatacaatggaagaagaggaggatgatgactggggagaagatacaactgaggaagctcaaaggcgtcgaatggatgaaatcagtgaccatgcaaaagttctgacactcagtgatgatttggaaagaacaattgaggagagggtcaatatcctctttgattttgttaagaaaaagaaagaagagggtgttattgattcatctgacaaagaaatcgttgctgaagcagaaagactggatgtaaaagccatgggccctcttgttctaactgaagttctttttaatgagaagattagagaacagattaagaaatacaggcgccatttcctacgattttgtcacaacaacaaaaaagcccaacggtaccttcttcatggtttggagtgtgtggtagcaatgcatcaagctcagcttatctccaagattccacatatcttgaaggagatgtacgatgcagaccttttagaagaagaggtcatcatcagctggtcggaaaaggcctctaagaaatatgtctccaaagaacttgccaaagagattcgtgtcaaagcagaaccatttataaaatggttgaaggaggcagaggaagaatcttctggtggcgaagaagaagatgaagatgagaacattgaggtggtgtattcgaaggctgccagtgtaccgaaagttgagactgtaaagtcagacaacaaggatgacgacatcgatattgatgccatttaaagggatggatgcaacctagcttaacagtataatgctgcaaattttcctccattatcagccagaagtgcaacatgtatgtgcaaaagctaaaatggcttaacatcatgctacactttacactaaaaatctattactgtgagtggtctgttattaagcccaatgagacatctagggagtccatacacatcagtgagcagatgtagtttgcttatttatagcatgtttctttttgaaaaactagtggtggacacatttggatcacatttatacagttataaaaataaaggtttgattttggtcgttcttcagatgtttggctctgaatgacttaagctgaagtaactggctccttactttaaatgttctgccatcatttcacctgatgagcattcttggagcctgccagatattgttaggtcctggggctgcaaagaggtcctcaacaggatgtaaagcaaacttaattgtaattaatttattcagcccattaagaaagtactaaagttttatctctgtagttcctcaaattggcatctggtaatgtacattgtgaggtagactgataatgaaatgacagtgcaacatcttaaccaagaagtaaatatgacctcagtgtcctataaataatgtaagagcaggatttgaaacttggagagctgttttctcatttcatgtacacttgccccaaattgtctttgaagtcgtgtgcattgcacgttggatgagccagggaaattattacattaacaagcattttgtgtgtgcgtagtagttactttgtactgagagaacttgctttggggtgcaattaaacaataaactgattttatttgggagaaacaaggaagggtgcacttaactagcaacctaagcatgatttttcagcttttgcccttagggtttaaattacaattccaaaatgttagacatactgtattttttcgttcagtgtggctttaattttcccctcttgcagtttgttctgtaatgccttttacatttggacacatagtttatgctttttagattttggttgctttcttgccaaaataagtgttaactgtgtttcaaacttgattttctttcttttttctttttttttcttccagaatgtcttatttaaaaagaaagctaaaagcatacttctaagtcagagcctctattttggtgtaagacttgggatattttttacttcacattgaatatagccaggcacccaagaagtctgatggccacctgagtgcaggtgacaaggacctgacagagcccatgcagggctttagatttggacacacaagagttgataacttcctcatgaactccttgcctgatctaaactcatattatgggttctgactgtttgagtaatcgtcttcaaggttaaacctcttggcagttacccttttcacaaagtgcacagtgggaatcgagaatcgatagggttaattttggagcagtggcttataccattcacctctgtttttttgtgattatttcacagataatgagaccttaataacaaataggcgtaaaaaaattttcacattgaaatgatagaaacatttgatgtaataaaacttggttggcttgatattttaaggaattgaaacctagcaatcttattggagagacaagaattggtctccagctgcctttgatcaagattcgggtgcaagtggagcaggagccatatacctggagggaatgtgctttgtcacaccaaagaggattttttttttcttcaaacttgtatgttgcctaggtttcaaattctttgccgcaaggctgatctgctttcattaactggaattctgtaggagatactggtgacctaagctaagttgcactcagcatactcagtgtcaagctaatgaggttctattataaaggttctacttttaatctgagggaaaacatgttcagggcttctagaacactaaaaaatttggcttaaaccagtgttcagtctggtgccaaacttcgaatggaatacaaattcacataatctgaactttgttcacaggttatcctaatagagtaattcttcactttgctctattgaactgtcttaaggatttgtttaaacagctaagttacttgattaaaataatgataaaattgtaaaaaaaaaaaaa

SEQ ID NO: 654 - DNA, 60 bp, Homo sapiens
acatcatgctacactttacactaaaaatctattactgtgagtgtgaaaaactagtggtgg

SEQ ID NO: 655 - DNA, 2653 bp, Homo sapiens
gagcgcggctggagtttgctgctgccgctgtgcagtttgttcaggggcttgtggtggtgagtccgagaggctgcgtgtgagagacgtgagaaggatcctgcactgaggaggtggaaagaagaggattgctcgaggaggcctggggtctgtgaggcagcggagctgggtgaaggctgcgggttccggcgaggcctgagctgtgctgtcgtcatgcctcaaacccgatcccaggcacaggctacaatcagttttccaaaaaggaagctgtctcgggcattgaacaaagctaaaaactccagtgatgccaaactagaaccaacaaatgtccaaaccgtaacctgttctcctcgtgtaaaagccctgcctctcagccccaggaaacgtctgggcgatgacaacctatgcaacactccccatttacctccttgttctccaccaaagcaaggcaagaaagagaatggtccccctcactcacatacacttaagggacgaagattggtatttgacaatcagctgacaattaagtctcctagcaaaagagaactagccaaagttcaccaaaacaaaatactttcttcagttagaaaaagtcaagagatcacaacaaattctgagcagagatgtccactgaagaaagaatctgcatgtgtgagactattcaagcaagaaggcacttgctaccagcaagcaaagctggtcctgaacacagctgtcccagatcggctgcctgccagggaaagggagatggatgtcatcaggaatttcttgagggaacacatctgtgggaaaaaagctggaagcctttacctttctggtgctcctggaactggaaaaactgcctgcttaagccggattctgcaagacctcaagaaggaactgaaaggctttaaaactatcatgctgaattgcatgtccttgaggactgcccaggctgtattcccagctattgctcaggagatttgtcaggaagaggtatccaggccagctgggaaggacatgatgaggaaattggaaaaacatatgactgcagagaagggccccatgattgtgttggtattggacgagatggatcaactggacagcaaaggccaggatgtattgtacacgctatttgaatggccatggctaagcaattctcacttggtgctgattggtattgctaataccctggatctcacagatagaattctacctaggcttcaagctagagaaaaatgtaagccacagctgttgaacttcccaccttataccagaaatcagatagtcactattttgcaagatcgacttaatcaggtatctagagatcaggttctggacaatgctgcagttcaattctgtgcccgcaaagtctctgctgtttcaggagatgttcgcaaagcactggatgtttgcaggagagctattgaaattgtagagtcagatgtcaaaagccagactattctcaaaccactgtctgaatgtaaatcaccttctgagcctctgattcccaagagggttggtcttattcacatatcccaagtcatctcagaagttgatggtaacaggatgaccttgagccaagaaggagcacaagattccttccctcttcagcagaagatcttggtttgctctttgatgctcttgatcaggcagttgaaaatcaaagaggtcactctggggaagttatatgaagcctacagtaaagtctgtcgcaaacagcaggtggcggctgtggaccagtcagagtgtttgtcactttcagggctcttggaagccaggggcattttaggattaaagagaaacaaggaaacccgtttgacaaaggtgtttttcaagattgaagagaaagaaatagaacatgctctgaaagataaagctttaattggaaatatcttagctactggattgccttaaattcttctcttacaccccacccgaaagtattcagctggcatttagagagctacagtcttcattttagtgctttacacattcgggcctgaaaacaaatatgaccttttttacttgaagccaatgaattttaatctatagattctttaatattagcacagaataatatctttgggtcttactatttttacccataaaagtgaccaggtagaccctttttaattacattcactacttctaccacttgtgtatctctagccaatgtgcttgcaagtgtacagatctgtgtagaggaatgtgtgtatatttacctcttcgtttgctcaaacatgagtgggtatttttttgtttgttttttttgttgttgttgtttttgaggcgcgtctcaccctgttgcccaggctggagtgcaatggcgcgttctctgctcactacagcacccgcttcccaggttgaagtgattctcttgcctcagcctcccgagtagctgggattacaggtgcccaccaccgcgcccagctaattttttaatttttagtagagacagggttttaccatgttggccaggctggtcttgaactcctgaccctcaagtgatctgcccaccttggcctccctaagtgctgggattataggcgtgagccaccatgctcagccattaaggtattttgttaagaactttaagtttagggtaagaagaatgaaaatgatccagaaaaatgcaagcaagtccacatggagatttggaggacactggttaaag

SEQ ID NO: 656 - DNA, 60 bp, Homo sapiens
caaggaaacccgtttgacaaaggtgtttttcaagattgaagagaaagaaatagaacatgc

SEQ ID NO: 657 - DNA, 1421 bp, Homo sapiens
acttactgcgggacggccttggagagtactcgggttcgtgaacttcccggaggcgcaatgagctgcattaacctgcccactgtgctgcccggctcccccagcaagacccgggggcagatccaggtgattctcgggccgatgttctcaggaaaaagcacagagttgatgagacgcgtccgtcgcttccagattgctcagtacaagtgcctggtgatcaagtatgccaaagacactcgctacagcagcagcttctgcacacatgaccggaacaccatggaggcgctgcccgcctgcctgctccgagacgtggcccaggaggccctgggcgtggctgtcataggcatcgacgaggggcagtttttccctgacatcatggagttctgcgaggccatggccaacgccgggaagaccgtaattgtggctgcactggatgggaccttccagaggaagccatttggggccatcctgaacctggtgccgctggccgagagcgtggtgaagctgacggcggtgtgcatggagtgcttccgggaagccgcctataccaagaggctcggcacagagaaggaggtcgaggtgattgggggagcagacaagtaccactccgtgtgtcggctctgctacttcaagaaggcctcaggccagcctgccgggccggacaacaaagagaactgcccagtgccaggaaagccaggggaagccgtggctgccaggaagctctttgccccacagcagattctgcaatgcagccctgccaactgagggacctgcaagggccgcccgctcccttcctgccactgccgcctactggacgctgccctgcatgctgcccagccactccaggaggaagtcgggaggcgtggagggtgaccacaccttggccttctgggaactctcctttgtgtggctgccccacctgccgcatgctccctcctctcctacccactggtctgcttaaagcttccctctcagctgctgggacgatcgcccaggctggagctggccccgcttggtggcctgggatctggcacactccctctccttggggtgagggacagagccccacgctgttgacatcagcctgcttcttcccctctgcggctttcactgctgagtttctgttctccctgggaagcctgtgccagcacctttgagccttggcccacactgaggcttaggcctctctgcctgggatgggctcccaccctcccctgaggatggcctggattcacgccctcttgtttccttttgggctcaaagcccttcctacctctggtgatggtttccacaggaacaacagcatctttcaccaagatgggtggcaccaaccttgctgggacttggatcccaggggcttatctcttcaagtgtggagagggcagggtccacgcctctgctgtagcttatgaaattaactaatt

SEQ ID NO: 658 - DNA, 60 bp, Homo sapiens
cttcctacctctggtgatggtttccacaggaacaacagcatctttcaccaagatgggtgg

SEQ ID NO: 659 - DNA, 1766 bp, Homo sapiens
caggactagagagcgagccgcaaggaagtcggtgcagtcgagacccccctccccatcccagcgcatcgcgtctccgccgagcttgagggcacgccggggacccctccccagagccggccggaccccaggtgccgaggccttggggagcgcggggcgtcccgggtcgcggtgccctcgggacgagacagcccctggcagtgccaccaccgcagccgccgggcgatctccaagcggcgatctctaagcgctgctctctgctcggccgcgggccaggaggggagggtccggccttgccccgcaggcgtccattggcggcttcccccggcctccgcgccatgccgcgggccgtgtgaaaggcggcagcaccggaacccgcaggtgtccgcgggcgcgccaagcccttttgggtagggggcgccttactcgctatgctgcaagggccccgggccttggcttcggccgctgggcagaccccgaaggtggtgcccgcgatgagccccacagagctgtggccatccggcctcagcagcccccagctctgcccagctactgctacctactacacaccgctgtacccgcagacggcgcctcccgcagcggcgccaggcacctgcctcgacgccactccccacggacccgagggccaagttgtgcgatgcctgccggcaggccggctgccggccaaaaggaagctggatctggaggggattgggaggcccgtcgtccctgagttcccaacccccaaggggaagtgcatcagagtggatggcctccccagccccaaaacccccaaatcccccggggagaagactcggtatgacacttcgctggggctgctcaccaagaagttcatttacctcctgagcgagtcagaggatggggtcctggacctgaactgggccgctgaggtgctggacgtgcagaagcggcgcatctatgacatcaccaacgtgctggaaggcatccagctcatccgcaagaaggccaagaacaacatccagtgggtaggcaggggaatgtttgaagaccccaccagacctgggaagcagcaacagctggggcaggagctgaaggagctgatgaacacggagcaggccttggaccagctcatccagagctgctctctgagcttcaagcacctgactgaggacaaggccaacaagaggctggcctatgtgacttaccaggatatccgtgctgttggcaactttaaggagcagacagtgattgccgtcaaggcccctccgcagacgagactggaagtgcccgacaggactgaggacaacctgcagatatatctcaagagcacccaagggcccatcgaagtctacctgtgcccagaggaggtgcaggagccggacagtccttccgaggagcctctcccctctacctccaccctctgccccagccctgactctgcccagcccagcagcagcaccgaccctagcatcatggagcccacagcatcctcagtgccagcaccagcgccaaccccccagcaggccccaccgcctccatccctggtccccttggaggctactgacagcctgctggagctgccgcacccactcctgcagcagactgaggaccagttcctgtccccgaccctggcgtgcagctcccctctgatcagcttctccccatccttggaccaggacgactacctgtggggcttggaggcgggtgagggcatcagcgatctcttcgactcctacgaccttggggacctgttgattaattgagtggccctgcctgcccccagcagc

SEQ ID NO: 660 - DNA, 60 bp, Homo sapiens
tatgagcaccatgtaagcctccttgtattgagataattgggcattaaacattaaactgca

SEQ ID NO: 661 - DNA, 1700 bp, Homo sapiens
agatttgaaggcggcgcgcggactaggtgcgcacttcagttctcggagagaagaggcgggagtggacctggtcagccctaccccactgaccccaccggacccaggcgcggcctccgccacagccacagcccctgcccctgctgcggcgcggcgaggcgaggcgatggccaaggtgtcggtgctgaacgtggcggtcctggagaacccgagccctttccacagccccttccggttcgagatcagcttcgagtgcagtgaagccctggcggacgacctggagtggaagatcatttatgttggctcggctgagagtgaggaatttgatcagatcctagactcggtgctggtgggccctgtgccagcagggagacacatgtttgtctttcaggccgacgcccccaacccatccctcatcccagagactgatgccgtgggtgtgactgtggtcctcatcacctgcacctaccatggacaggagttcatccgagtgggctactacgtcaacaacgagtacctcaaccctgagctgcgtgagaacccgcccatgaagccagatttctcccagctccagcggaacatcttggcctcgaacccccgggtgacccgcttccatatcaactgggacaacaacatggacaggctggaggccatagagacccaggacccctccctgggctgcggcctcccactcaactgcactcctatcaagggcttggggctccctggctgcatccctggcctcctccctgagaactccatggactgcatctaactgcaggaacccagagtgtcccagcacgccgggaggggcaaccaggcctcccagcgagtcctgcagggcccatctagaggactttgggggccatcagctgcaatccaggtctgtcaaactcagcccctaggaaagaacaggccttgggtctcccctagtcctggccagaaggatgatctcgcttttcctctacaggcctataagaagcaggtacttcagttctaaattctgacttgtgttcttttcgtcttcataaattctaactaaggccactgtgccactgtgcacccttgagtaccattgatccaaagctttcccacagacctccctggcccacctagaggctttcttggtcagtgcctgtcaaggctccagtcctgctgagccaaaggctttgtcattcctttctcttcctgtacatctgagcagacccactccagctttctggtgtcacaggcgggaatgttagttagtaggtagacttagatcccatttctgtcctgctcccaggaagattcttaggtcctcttcaatccagcagcccctcccagaggtgtgatcagcaggatgctgaggaaccatgttgcctttcctgtcaatcacagccaccttcctgttatctcctaaatggatctggcttttcctggaggctgccatggttggaagatggtatcagagggcctgcctgggcagtctgtctccgggccagggtcagggaccctctgcctctggcagccttaacctgtcctctgctaggaccagggtgatttcaagccagggaagcaactgggaccctgaaaactgtccctccccagcccgctccccctctctgtgccctggtccccttgccgccatgtggatgctgttgtgattgctgtttgtatattatcaaaatgtttttatattaaaaatgtttggtctgaaaatt

SEQ ID NO: 662 - DNA, 60 bp, Homo sapiens
tccagctttctggtgtcacaggcgggaatgttagttagtaggtagacttagatcccattt

SEQ ID NO: 663 - DNA, 533 bp, Homo sapiens
tgctcagttcatccctagaggcagctgctccaggaacagaggtgccatgcagccccgggtactccttgttgttgccctcctggcgctcctggcctctgcccgagcttcagaggccgaggatgcctcccttctcagcttcatgcagggttacatgaagcacgccaccaagaccgccaaggatgcactgagcagcgtgcaggagtcccaggtggcccagcaggccaggggctgggtgaccgatggcttcagttccctgaaagactactggagcaccgttaaggacaagttctctgagttctgggatttggaccctgaggtcagaccaacttcagccgtggctgcctgagacctcaataccccaagtccacctgcctatccatcctgcgagctccttgggtcctgcaatctccagggctgcccctgtaggttgcttaaaagggacagtattctcagtgctctcctaccccacctcatgcctggcccccctccaggcatgctggcctcccaataaagctggacaagaagctgctatg

SEQ ID NO: 664 - DNA, 60 bp, Homo sapiens
gaaagactactggagcaccgttaaggacaagttctctgagttctgggatttggaccctga

SEQ ID NO: 665 - DNA, 2714 bp, Homo sapiens
atctgcaagggggaaacaggattttggcagcaatcctttcattactaaagcttcctttcttttcgggtacagtgaaaagagccaaggctgtgtgaccccctcatcacttagccaggcgtatggtcctggtttctgaggctgccagaaagcatcttagcaatttgtgtttggaaggtccatgcctgactattctaggctggaggttcctaaagagtaacaagaggaagagaaacaagaatctctgacacttgttgagaatagagcacagtcccatttgtttgaaaagagacaccaggcagccatgtttatgtgccagaaatgcattccacctcaaggaggacttaatttatggacccgtgtgtgccaggctgagctgggcaagatctttctcaggacaaactctgccatgcagctaaaagcctggaaactaaaggatttcatgtagtaaactatcttccaacccctgtaggcatcagaccacaggatgaggtttcagaaggtcataaggcagaatagttaagcctacagggcttacagtctgacagacctgggttcagttcttgggtcttcatcactagttttgtgacttcgggaagatgactcccggagcctcagtgagcctcagttacttcatatgtaaatgaagtaatactatctacttcacaaggctgttgaaaggattaaatggagaatgggtgtaaaacccttagtgcagtgccgtgcacacaccgtagatgccgaacgtgtgatgttggcactacacaatgtgtaatcccaatcaggcagagctaggcaggcaaatctaatccaggatctttgtaaggggactgagaaccagagactggagaaagccagtgtaaacaccatgagcaaaggagcaagagaaggggcattgtgtaagtaggagatggagcttggacttactaagtggatcagggtagaagaatccagtcaggaccaagggaggagagtccaggaaaatgccatgagcagctctgtagcatgaccttgttgggctgggttaaagtagggtctgccaccagtcatgtgacagaaaggtacctcatgcacttcctccttcccccagaaatcagcctccaggagtgaggaatgagcccagaatgagagtttagagtgctccagagcctttgttagaggtgccctccgacattcagaaaaccaggattccagagacctgggtttgagtcctgactttgcagcatactaactgtgtgatcttgaaccaacatattttcacctaatgaggctgacaatcttccctacttcacaaaatagttatgagagtcaaataaaagtacattttagaaagtgaaatgctgtggacatttaaggtggagccactgtgagagtctagggggacagatggtagtcgtctcagaatgaaacgaatacacccctctcagagccctttccaaggatcccctccttctttcagctccttccctccacctcaatacacactcctgtcccaggaacctaacctcatctagaaataccagggccagcatgccttacacctagaggtttggttggcttcagagaaacttctggaggctaaaagcagccaagaagaatcagccactacatgctgggcctggatgaacagagcagtgagctgtgatggggctggggctggggcccaggaggagcaggcaggagagtttgtatgcaccgtgattcaaatattataacaaaaatcatcgatcatgtgttaggcactttacagttcccaaagcactttcccatccatgccctgatggtctttgacacaacactgtggtgtgggttttattatttccagtacagatgaggaagactgaggcctgcatcagtgaagcaacctatccaagactacatagagaaggcagtaaatggcagggttagtctcagaacaggggagggtctgttccccccgcagtgggcagtcctaattctgaacttcacctatctgggggtgatagaggggaacaagaggaagcctgctgaagagaaaacctaaacatctgttttgtctacgtatgacttcctctgcttgtgggagagaaggaaggaaaggaacacattgttgtcagccccacaaccccaacagaattaaaccctggagcaggttgaacagcagaggcttccctcagatcaaggagccaggagcagatgatctatctctgtggccacacagagagatgtcaccttatgcaatttgcatatcatattcaattcccccaactgctctttctaatttattcaactggggaccaggctggtctcatgccaacctaggagatgtaccatagcagtatgagcagaattcctcaggaggaacaattagcaaaaactgcagttgcctctcgataggcctgagcagagagaggaacaatagctctcacgtctctcctcatcagattctaactaagcagatgttctcatgcttttttcttcttcctatgttctgtatactgacacctcttctcagtggcatatgaaatatgaaatgtcatgtgttgtgagtttgtatgaatataaaggaatatatatacacagtagcaaaagagaagatctcatttacaaatatctatggtgtttccttgttctgtgttgatctgttttattgatacaaactgaattttcttaatgtatcttctatctctattatagtggcaatgatggtatatgcattaaagttcttctgaattgtg

SEQ ID NO: 666 - DNA, 60 bp, Homo sapiens
acacagtagcaaaagagaagatctcatttacaaatatctatggtgtttccttgttctgtg

SEQ ID NO: 667 - DNA, 5484 bp, Homo sapiens
tggcgaggcgggaagcacccggaatcttcctggccctagagcctgcaggctccaggccggccccttgaatctcaccgcgaggaaggcaccctgctgcctgcacttatttgcatccaagagtttgcattgagactggcgcttgcctactagggcagccacaggggggttccccagggacagagattatgtctactttgagaattcctccagcaacccatacctaataagaaggatagaagaactcaacaagactgcaagtggcaacgtggaagcaaaagtagtatgcttttatagacgacgtgatatttccaacacacttataatgctcgcagataagcatgctaaagaaattgaggaagaatctgaaacaacagttgaggctgacttgaccgataagcagaaacatcagttgaaacatagggaactctttttgtcacgccagtatgaatctctgcccgcaacacatatcaggggaaagtgcagtgttgcccttctgaatgagacagaatcagtattgtcatatcttgataaggaggataccttcttctactcattggtctatgacccctcattgaaaacactattagctgacaaaggtgaaatcagagtgggacctagatatcaagcagacattccagaaatgctgttagaaggagaatcagatgagagggaacaatcaaaattggaagttaaagtttgggatccaaatagcccacttacggatcgacagattgaccagtttttagttgtagcacgtgctgttgggacattcgccagagccctggattgcagcagttctgtgaggcagcctagtttgcatatgagtgctgctgcagcttcccgagacatcaccttgtttcacgctatggatacattgtatagacacagctatgatttgagcagtgccattagtgtcttagtaccactcggaggacctgttttatgcagagatgaaatggaggaatggtcagcctctgaagctagcttatttgaagaggcactggaaaaatatggcaaagacttcaatgacatacggcaagattttcttccttggaaatcattgactagcatcattgaatattattacatgtggaaaactactgacagatatgtgcaacagaaacgtctaaaagcagcagaagctgagagtaaactgaaacaagtatatatcccaacctacaaaccaaatcccaaccaaatatccactagtaatgggaagcctggtgctgtgaatggagctgtggggaccacgttccagcctcagaatcctctcttagggagagcctgtgagagctgctatgctacacagtctcaccagtggtattcttggggcccacctaatatgcagtgtagattatgtgcaatttgttggctttattggaaaaaatatggaggcttgaaaatgcccacccagtcagaagaagagaagttatctcctagcccaactacagaggaccctcgtgttagaagtcacgtgtcccgccaggccatgcagggaatgccagtccgaaacactgggagtccaaagtctgcagtgaagacccgccaagctttcttccttcatactacatatttcacaaaatttgctcgtcaggtctgcaaaaataccctccggctgcggcaggcagcaagacggccgtttgttgctattaattatgctgccattagggcagaatatgcagacagacatgctgaactatctggaagtccactgaaaagcaaaagcactaggaagcctttggcatgtatcattgggtatttagagatccatcctgcaaagaaacctaatgtaattcgatctacaccaagcctgcaaaccccaactaccaagcggatgctaacaactccaaatcacacatctctgagcattctggggaaaagaaactacagtcatcacaatggtctggatgaactcacgtgctgtgtgtcagactgagctttccctgattcattctacaatccaagacttgctgcactgtcctgctgatgttcacagccgtgcctgggaagaaggcagccccactcccagtacatttcagtgggagacctctgcgtgcatccatggagacgcaatggggcggggaaggaactgtgggagtgcacgttccaaatcctgtgtctccacgtgtggatcagcagcacctcgctttcttgtcagagacctcgctgttacggagcgagacctgctgagaattgaggggctgagggaacccctccacctcctcccttctgcagcgccctgcgccccacccagcaacagcggccacttggcagtggggctgctgcaagctcagagccgctgccaccctgcatgtgtccgctcagctcggtcttatgctgtatagttactaaatatgtacaggagggccatggcatctttctgaatggatttttcttaagaaatgcgccagtgtttatgaggttcaaggtatttccctgtccttgctgttaccgtcactcagctttttctcgataggcttcatccttgtttttttgaaatgggggaatttgctgtttaccctctgcattcctatatgtgaccctccctcctactcctccaaggaacagaattaccgaggttctgacaaaagataagcctgtaaactcatcatctgtgttttgtggttggagagaaactggtgttctgcccggctctgcttggtcacagacagctccagcaagagcagttgttaaaagtgccaagcgtgtgtatcactgtgacaagccgtttgcttactgccctgttcccttgcagccaaaccagctgatgaagaactgctgccaggtgggtcctacagcaggtcacaaatgacctagtttcattttaagcagacagactctgtttggcctagaggtgtggagtgagagaactgtgtttgtgggtatgagtctgtgtggccaaccccatgacccccacccctccagcccaacatcttgtgagcacatgtgacctaggccccgggggacctgcctgctcctttggcttgggctcttcgtgtttcccacctgccctcggcacgagcccttggtggcatcacagttggccactcagctgtgctgagtagctgtgctacttgtgctggcagctgcaaggataggaatagctcagcgcccgatgagctccctgagcagatgtgaggctggcaactcccctgccctctgtttgcaggcacagggtcacagtcccaagaaagacaactggagtctgatctcccagccatctctggggttactaggaggcagctggatggcagatacgagaggcccaaatagccaagctgttgcaagacagagtggctacaattgaattgacaccctgggaagcacgaggtaacttggtaaggataatgatgctgtagatgtctgtgtcctcggaggctgagctccgcttggcagagagagcgtgctgtgtgaggtggagggcggttttgcagacatctcagcttcttttctgaggaggagttggttctcatcttaggcttctgcaagggcgagcatgggatgtctccaccaccacccactcttggagctgtgctgggtcttggcttggggcgctgagggtggggcctgtgtcagaagcatttggtgagaggggtggaggtggcaggcaggggttctcctcagggttcccactgaggggtcccttcagcaaagacctgggaggaggtgccgcatcacgtggatgtttcttccctaaagaaaaagacacaggaaagctgtctgtctgtaccctgctctggatttattgtcgtacttggacccagaaggggaaatgattccctcaccctttcactttctctctgaacccctactaagtggtgactgcagattctggaaacaattagctgcccgtgactcagctgccagcttcattttctctgccttttgggagaggccctctcacccaggcccaagagatttggagacaggagtcaggccaggtctgaagcaggagaagggaggcccctcctatctacccagttgacatttggctttgggaaaagcgcagcttgttcgagccacgtgtgccaagcaggcttttccttcctcttgtaagtaaagctcgtggttctgtagtccagtcatcctaggagggtgatgttgactgagacttcacgctctccctttgtctctggaaactgccccctcgttctgacagaatcccccaggcaatggaggaagggtgccgaggcgcctctagtctgtgcctttgccgttggaagcatttggtgctgagagggtttcccagccacccgctccctttctggggccatggtgtccctgctgtgtgtcagtggcatgtcactgtggttcagtgagcacatgggtggacgtgcagagactgtctgcgcagcccccagcagacatgcccctggggtgaggacacaggctctgcaggctatctccccctctggctcagtcatcgcctgcccacccttcacttcttaaaggtgcgcaagagaggagggccgactggagggtgtcgccggaaggtttcagcctgcccttcacaattccccttgtgcacagcccagttttccatctctcagggcccacccaggaaaatggatttcaagtgggggttttcatccagagatttgtttaacacaaaacaagaaaagctgagaggcaaaacaggggagtgaggggcaacccagaggtggggaacaacaacagcaagccgcccccatcctgagactggctgggcaccaggggaggacgcgtcaccagagcctggggccaaggccactgggggacctgccacactgtggacctgtctggtgggggctggagcctcgagaagccatgattcttgtcagaaacatttccccaggcagagagagggggccccagcctctcccctcctcttggcctccagagtcctgcaggtgcctcacagtagtgaaacccagttggaagcagctgccctgggagcctgggacaggcgacccaccgggtcagtcccctgccactcagagcagagcagggggctgagggcaagcaggtggggctgtgcgtggcctcagtgcactcggtgtcatgtctgagcctggtgtttatgccccactgctgtcctaagtccctggcgaggggaggtggaggagctgccccgtgggtgtttggagattctgttttactctgcctagagaggaaacggctttggggagggagggggaagcctttattctttactgttgtccctgttttcctttgggggaatttactcagttagcagcccctcctcaccattccccccaggaaggccatgtcccagttttctgtccacccctcctgttcctctgcactatgtctctgattttccctgccagggaagctaacccagagcacgcacctgtgctcatgagtgtttccgcaggataattcgttctgagcatgataccacagtgtggattgtctgtctgtaaggagatgccatctactaaccaatttgtattgtgtttccaataaattcctggaaatttt

SEQ ID NO: 668 - DNA, 60 bp, Homo sapiens
gtctgtaaggagatgccatctactaaccaatttgtattgtgtttccaataaattcctgga

SEQ ID NO: 669 - DNA, 1749 bp, Homo sapiens
ggcgcttccgcaggaagaaggaagcggcgccgccatcgcctcccggcgctccctccccgactcctaagtccttcggccgccaccatgtccgcctcggctgtcttcattctggacgttaagggcaagccattgatcagccgcaactacaagggcgatgtggccatgagcaagattgagcacttcatgcctttgctggtacagcgggaggaggaaggcgccctggccccgctgctgagccacggccaggtccacttcctatggatcaaacacagcaacctctacttggtggccaccacatcgaagaatgccaatgcctccctggtgtactccttcctgtataagacaatagaggtattctgcgaatacttcaaggagctggaggaggagagcatccgggacaactttgtcatcgtctacgagttgctggacgagctcatggactttggcttcccgcagaccaccgacagcaagatcctgcaggagtacatcactcagcagagcaacaagctggagacgggcaagtcacgggtgccacccactgtcaccaacgctgtgtcctggcgctccgagggtatcaagtataagaagaacgaggtcttcattgatgtcatagagtctgtcaacctgctggtcaatgccaacggcagcgtccttctgagcgaaatcgtcggtaccatcaagctcaaggtgtttctgtcaggaatgccagagctgcggctgggcctcaatgaccgcgtgctcttcgagctcactggccgcagcaagaacaaatcagtagagctggaggatgtaaaattccaccagtgcgtgcggctctctcgctttgacaacgaccgcaccatctccttcatcccgcctgatggtgactttgagctcatgtcataccgcctcagcacccaggtcaagccactgatctggattgagtctgtcattgagaagttctcccacagccgcgtggagatcatggtcaaggccaaggggcagtttaagaaacagtcagtggccaacggtgtggagatatctgtgcctgtacccagcgatgccgactcccccagattcaagaccagtgtgggcagcgccaagtatgtgccggagagaaacgtcgtgatttggagtattaagtctttcccggggggcaaggagtacttgatgcgagcccactttggcctccccagtgtggaaaaggaagaggtggagggccggccccccatcggggtcaagtttgagatcccctacttcaccgtctctgggatccaggtccgatacatgaagatcattgagaaaagtggttaccaggccctgccctgggttcgctacatcacccagagtggcgattaccaacttcgtaccagctagaagggagaagagatgggggcttgaacacggggcttccttacagccccggatgcagattttagagggagggcaggtgcgggctgtgtgtgtctgtgtgagggcaggtcctggacttggcagtttcttgctcccagcacccgccccttcctcacctcttccttattccataggctgggagagaaactctctgcttccctcgcccttggagctttccccatccccctgattttatatgaagaaatagaagaggggcttgaagtccccctcgcgagtgccttcttgcaattacctgccttagcgggtgttgcgggtccctccttcacagccgctgagcccagaggtcccgctggcccctcctctgaattttaggatgtcattaaaaagatgaatcta

SEQ ID NO: 670 - DNA, 60 bp, Homo sapiens
ttatatgaagaaatagaagaggggcttgaagtccccctcgcgagtgccttcttgcaatta

SEQ ID NO: 671 - DNA, 520 bp, Homo sapiens
agagagtcagtgagggtgttagaggtagctgaaggagtggaagggagttagctagttgaaggaacactggaggactgtcggggatttgggggattaagtaaaaggtttataaggagagggtggaaagagtggttgatggctgatattctgatcatttatactagctactcagtctctactttttctagaagtccccagtaaccaaagcccaacacatttggtatcgttgattccttccattgtttgctttgctttgggttgcctaaggctgtggttatctctgagccacctaaattctcaccctcagctgaaatcactactgtctcttcatggctctcagtatatttcaatccttcttcaggaactggagcttttgagaataaggcaactttaggattgaccctaggacagaagctctgctctcaggatccttgtatgctcctgaatatgaattccatagtatgatatttggagctccccagatccttgtaggcatatgtgtgtgtgtgtatttgaggcc

SEQ ID NO: 672 - DNA, 60 bp, Homo sapiens
tctgatcatttatactagctactcagtctctactttttctagaagtccccagtaaccaaa

SEQ ID NO: 673 - DNA, 3868 bp, Homo sapiens
atgaacctctgaaaactgccggcatctgaggtttcctccaaggccctctgaagtgcagcccataatgaaggtcttggcggcaggagttgtgcccctgctgttggttctgcactggaaacatggggcggggagccccctccccatcacccctgtcaacgccacctgtgccatacgccacccatgtcacaacaacctcatgaaccagatcaggagccaactggcacagctcaatggcagtgccaatgccctctttattctctattacacagcccagggggagccgttccccaacaacctggacaagctatgtggccccaacgtgacggacttcccgcccttccacgccaacggcacggagaaggccaagctggtggagctgtaccgcatagtcgtgtaccttggcacctccctgggcaacatcacccgggaccagaagatcctcaaccccagtgccctcagcctccacagcaagctcaacgccaccgccgacatcctgcgaggcctccttagcaacgtgctgtgccgcctgtgcagcaagtaccacgtgggccatgtggacgtgacctacggccctgacacctcgggtaaggatgtcttccagaagaagaagctgggctgtcaactcctggggaagtataagcagatcatcgccgtgttggcccaggccttctagcaggaggtcttgaagtgtgctgtgaaccgagggatctcaggagttgggtccagatgtgggggcctgtccaagggtggctggggcccagggcatcgctaaacccaaatgggggctgctggcagaccccgagggtgcctggccagtccactccactctgggctgggctgtgatgaagctgagcagagtggaaacttccatagggagggagctagaagaaggtgccccttcctctgggagattgtggactggggagcgtgggctggacttctgcctctacttgtccctttggccccttgctcactttgtgcagtgaacaaactacacaagtcatctacaagagccctgaccacagggtgagacagcagggcccaggggagtggaccagcccccagcaaattatcaccatctgtgcctttgctgccccttaggttgggacttaggtgggccagaggggctaggatcccaaaggactccttgtcccctagaagtttgatgagtggaagatagagaggggcctctgggatggaaggctgtcttcttttgaggatgatcagagaacttgggcataggaacaatctggcagaagtttccagaaggaggtcacttggcattcaggctcttggggaggcagagaagccaccttcaggcctgggaaggaagacactgggaggaggagaggcctggaaagctttggtaggttcttcgttctcttccccgtgatcttccctgcagcctgggatggccagggtctgatggctggacctgcagcaggggtttgtggaggtgggtagggcaggggcaggttgctaagtcaggtgcagaggttctgagggacccaggctcttcctctgggtaaaggtctgtaagaaggggctggggtagctcagagtagcagctcacatctgaggccctgggaggtcttgtgaggtcacacagaggtacttgagggggactggaggccgtctctggtccccagggcaagggaacagcagaacttagggtcagggtctcagggaaccctgagctccaagcgtgctgtgcgtctgacctggcatgatttctatttattatgatatcctatttatattaacttattggtgctttcagtggccaagttaattcccctttccctggtccctactcaacaaaatatgatgatggctcccgacacaagcgccagggccagggcttagcagggcctggtctggaagtcgacaatgttacaagtggaataagcttacgggtgaagctcagagaagggtcggatctgagagaatggggaggcctgagtgggagtggggggccttgctccacccccatcccctactgtgacttgctttagcgtgtcagggtccaggctgcaggggctgggccaatttgtggagaggccgggtgcctttctgtcttgcttccagggggctggttcacactgttcttgggcgccccagcattgtgttgtgaggcgcactgttcctggcagatattgtgccccctggagcagtgggcaagacagtccttgtggcccaccctgtccttgtttctgtgtccccatgctgcctctgaaatagcgccctggaacaaccctgcccctgcacccagcatgctccgacacagcagggaagctcctcctgtggcccggacacccatagacggtgcggggggcctggctgggccagaccccaggaaggtggggtagactggggggatcagctgcccattgctcccaagaggaggagagggaggctgcagacgcctgggactcagaccaggaagctgtgggccctcctgctccacccccatcccactcccacccatgtctgggctcccaggcagggaacccgatctcttcctttgtgctggggccaggcgagtggagaaacgccctccagtctgagagcaggggagggaaggaggcagcagagttggggcagctgctcagagcagtgttctggcttcttctcaaaccctgagcgggctgccggcctccaagttcctccgacaagatgatggtactaattatggtacttttcactcactttgcacctttccctgtcgctctctaagcactttacctggatggcgcgtgggcagtgtgcaggcaggtcctgaggcctggggttggggtggagggtgcggcccggagttgtccatctgtccatcccaacagcaagacgaggatgtggctgttgagatgtgggccacactcacccttgtccaggatgcagggactgccttctccttcctgcttcatccggcttagcttggggctggctgcattcccccaggatgggcttcgagaaagacaaacttgtctggaaaccagagttgctgattccacccggggggcccggctgactcgcccatcacctcatctccctgtggacttgggagctctgtgccaggcccaccttgcggccctggctctgagtcgctctcccacccagcctggacttggccccatgggacccatcctcagtgctccctccagatcccgtccggcagcttggcgtccaccctgcacagcatcactgaatcacagagcctttgcgtgaaacagctctgccaggccgggagctgggtttctcttccctttttatctgctggtgtggaccacacctgggcctggccggaggaagagagagtttaccaagagagatgtctccgggcccttatttattatttaaacatttttttaaaaagcactgctagtttacttgtctctcctccccatcgtccccatcgtcctccttgtccctgacttggggcacttccaccctgacccagccagtccagctctgccttgccggctctccagagtagacatagtgtgtggggttggagctctggcacccggggaggtagcatttccctgcagatggtacagatgttcctgccttagagtcatctctagttccccacctcaatcccggcatccagccttcagtcccgcccacgtgctagctccgtgggcccaccgtgcggccttagaggtttccctccttcctttccactgaaaagcacatggccttgggtgacaaattcctctttgatgaatgtaccctgtggggatgtttcatactgacagattatttttatttattcaatgtcatatttaaaatatttattttttataccaaatgaatcacttttttttttaagaaaaaaaagagaaatgaataaagaatctactcttcg

SEQ ID NO: 674 - DNA, 60 bp, Homo sapiens
tcctttccactgaaaagcacatggccttgggtgacaaattcctctttgatgaatgtaccc

SEQ ID NO: 675 - DNA, 2068 bp, Homo sapiens
ttgaactcctggagcccgtcacccaggaaaccggccgcaatcgccggccgacctgaagctggtttcatggcagcctcaaagaaggcagttttggggccattggtgggggcggtggaccagggcaccagttcgacgcgctttttggttttcaattcaaaaacagctgaactacttagtcatcatcaagtagaaataaaacaagagttcccaagagaaggatgggtggaacaggaccctaaggaaattctacattctgtctatgagtgtatagagaaaacatgtgagaaacttggacagctcaatattgatatttccaacataaaagctattggtgtcagcaaccagagggaaaccactgtagtctgggacaagataactggagagcctctctacaatgctgtggtgtggcttgatctaagaacccagtctaccgttgagagtcttagtaaaagaattccaggaaataataactttgtcaagtccaagacaggccttccacttagcacttacttcagtgcagtgaaacttcgttggctccttgacaatgtgagaaaagttcaaaaggccgttgaagaaaaacgagctctttttgggactattgattcatggcttatttggagtttgacaggaggagtcaatggaggtgtccactgtacagatgtaacaaatgcaagtaggactatgcttttcaacattcattctttggaatgggataaacaactctgcgaattttttggaattccaatggaaattcttccaaatgtccggagttcttctgagatctatggcctaatgaaagctggggccttggaaggtgtgccaatatctgggtgtttaggggaccagtctgctgcattggtgggacaaatgtgcttccagattggacaagccaaaaatacgtatggaacaggatgtttcttactatgtaatacaggccataagtgtgtattttctgatcatggccttctcaccacagtggcttacaaacttggcagagacaaaccagtatattatgctttggaaggttctgtagctatagctggtgctgttattcgctggctaagagacaatcttggaattataaagacctcagaagaaattgaaaaacttgctaaagaagtaggtacttcttatggctgctacttcgtcccagcattttcggggttatatgcaccttattgggagcccagcgcaagagggataatctgtggactcactcagttcaccaataaatgccatattgcttttgctgcattagaagctgtttgtttccaaactcgagagattttggatgccatgaatcgagactgtggaattccactcagtcatttgcaggtagatggaggaatgaccagcaacaaaattcttatgcagctacaagcagacattctgtatataccagtagtgaagccctcaatgcccgaaaccactgcactgggtgcggctatggcggcaggggctgcagaaggagtcggcgtatggagtctcgaacccgaggatttgtctgccgtcacgatggagcggtttgaacctcagattaatgcggaggaaagtgaaattcgttattctacatggaagaaagctgtgatgaagtcaatgggttgggttacaactcaatctccagaaagtggtattccataaaacctaccaactcatggattcccaagatgtgagctttttacataatgaaagaacccagcaattctgtctcttaatgcaatgacactattcatagactttgattttatttataagccacttgctgcatgaccctccaagtagacctgtggcttaaaataaagaaaatgcagcaaaaagaatgctatagaaatatttggtggtttttttttttttaaacatccacagttaaggttgggccagctacctttgggggtgaccccccccattgccataacatcctgctccattccctctaagatgtaggaagaattcggatccttaccattggaatcttccatcgaacatactcaaacacttttgggccaggatttgagtctctgcatgacatatacttgattaaaaggttattactaacctgttaaaaatc

SEQ ID NO: 676 - DNA, 60 bp, Homo sapiens
aggaagaattcggatccttaccattggaatcttccatcgaacatactcaaacacttttgg

SEQ ID NO: 677 - DNA, 2360 bp, Homo sapiens
agcagacagagagaggaggttgtctgggacagactgctcctgacagaaggatgtcccagctgagcctgtcctggctgggcctctggccagtggcagcatccccttggctgctcctcctgctggtcggggcctcctggctcctggcccatgtcctggcctggacctacgccttctatgacaactgccgccgccttcggtgtttcccacaacccccaagacggaactggttttggggacaccagggcatggtcaaccccacagaggagggcatgagagttctgactcagctggtggccacctacccccagggctttaaggtctggatgggacccatctcccccctcctcagtttgtgccaccccgacatcatccggtctgtcatcaacgcctcagctgccattgcaccaaaggacaagttcttctacagcttcctggagccctggctgggggatgggctcctgctgagtgctggtgacaagtggagccgccaccgtcggatgctgacgcctgccttccatttcaacatcctgaagccctatatgaagattttcaatgagagtgtgaacatcatgcacgccaagtggcagctcctggcctcagagggtagtgcctgtttggatatgtttgagcacatcagcctcatgaccttggacagtctacagaaatgtgtcttcagctttgacagccattgtcaggagaaacccagtgaatatattgccgccatcttggagctcagtgcccttgtatcaaaaagacaccatgagatcctcctgcatattgacttcctgtattatctcacccctgatgggcagcgtttccgcagggcctgccgcctggtgcacgacttcacagatgccgtcatccaggagcggcgccgcactctccctagccagggtgttgatgacttcctccaagccaaggccaaatccaagactttggacttcattgatgtactcctgctgagcaaggatgaagacgggaagaagttatctgatgaggacataagagcagaagctgacacctttatgtttgagggccatgacaccacggccagtggtctctcctgggtcctgtaccaccttgcaaagcacccagaataccaggagcgctgccggcaggaggtgcaagaacttctgaaggaccgtgagcctaaagagattgaatgggacgacctggcccatttgcccttcctgaccatgtgcatgaaggagagcctgcggctgcatcccccagtcccggtcatctcccgccatgtcacccaggacattgtgctcccagacggccgggtcatccccaaaggcattatctgcctcatcagtgttttcggaacccatcacaacccagctgtgtggccggaccctgaggtctacgacccctttcgctttgacccagagaacatcaaggagaggtcacctctggcttttattcccttctcggcagggcccaggaactgcatcgggcagacgttcgcgatggcggagatgaaggtggtcctggcgctcacgctgctgcgcttccgcgtcctgcctgaccacaccgagccccgcaggaagccggagctggtcctgcgcgcagagggcggactttggctgcgggtggagcccctgagctgagttctgcagagacccactctgaccccactaaaatgacccctgattcatcaaaagtgaagcctagaattaccctaagaccctgttccacagtcctgtattccatcctagatatctactcaaaataattgagacaagtgttcaaacagaaagacgcttgtgcgtgaatgttcatggcggccctattcacagtagccaaacgatgaaaacaaccccaagctatatattaccagatgaaaggataaacaaaatgtggtccatccatacaatggagtattacacagccataaaaaggaatgaagcagtgatccctactacactgtggatgaaccttgaatgcatgatactgaatgaaagacgtcagatgcaaaaggtcacatagtgtactgtccttttatacgaaatttccagaacaggccaatctgaagagatgcatagcggattggtggctttcagcagctgtggggaggtgggactgaggagcgactgctaatcagtatggggtttcctcccgggatggtgaaaatgttccggacctagatactgacgaaggtagcacgacactgtgagtgcactaaatgctattgaattggacactttgaaatggtgaatttcgtggtatgtgaattctacctcaatcaaaaaaatttgctattttatctcacatacattttttttctgtccaggttgttcatataataatatgctgtgagcatctttccatgacattaaatcatcttaggaaacatt

SEQ ID NO: 678 - DNA, 60 bp, Homo sapiens
ttttttctgtccaggttgttcatataataatatgctgtgagcatctttccatgacattaa

SEQ ID NO: 679 - DNA, 1270 bp, Homo sapiens
agacgttcgcacacctgggtgccagcgccccagaggtcccgggacagcccgaggcgccgcgcccgccgccccgagctccccaagccttcgagagcggcgcacactcccggtctccactcgctcttccaacacccgctcgttttggcggcagctcgtgtcccagagaccgagttgccccagagaccgagacgccgccgctgcgaaggaccaatgagagccccgctgctaccgccggcgccggtggtgctgtcgctcttgatactcggctcaggccattatgctgctggattggacctcaatgacacctactctgggaagcgtgaaccattttctggggaccacagtgctgatggatttgaggttacctcaagaagtgagatgtcttcagggagtgagatttcccctgtgagtgaaatgccttctagtagtgaaccgtcctcgggagccgactatgactactcagaagagtatgataacgaaccacaaatacctggctatattgtcgatgattcagtcagagttgaacaggtagttaagcccccccaaaacaagacggaaagtgaaaatacttcagataaacccaaaagaaagaaaaagggaggcaaaaatggaaaaaatagaagaaacagaaagaagaaaaatccatgtaatgcagaatttcaaaatttctgcattcacggagaatgcaaatatatagagcacctggaagcagtaacatgcaaatgtcagcaagaatatttcggtgaacggtgtggggaaaagtccatgaaaactcacagcatgattgacagtagtttatcaaaaattgcattagcagccatagctgcctttatgtctgctgtgatcctcacagctgttgctgttattacagtccagcttagaagacaatacgtcaggaaatatgaaggagaagctgaggaacgaaagaaacttcgacaagagaatggaaatgtacatgctatagcataactgaagataaaattacaggatatcacattggagtcactgccaagtcatagccataaatgatgagtcggtcctctttccagtggatcataagacaatggaccctttttgttatgatggttttaaactttcaattgtcactttttatgctatttctgtatataaaggtgcacgaaggtaaaaagtattttttcaagttgtaaataatttatttaatatttaatggaagtgtatttattttacagctcattaaacttttttaaccaaacagaaaaaaaaaaaaaaaaaaaaaaaaaaaaaaaaa

SEQ ID NO: 680 - DNA, 60 bp, Homo sapiens
gttgctgttattacagtccagcttagaagacaatacgtcaggaaatatgaaggagaagct

SEQ ID NO: 681 - DNA, 2922 bp, Homo sapiens
ggacaccgggccatgcacgcccccaactgaagctgcatctcaaagccgaagattccagcagcccaggggatttcaaagagctcagactcagaggaacatctgcggagagacccccgaagccctctccagggcagtcctcatccagacgctccgctagtgcagacaggagcgcgcagtggccccggctcgccgcgccatggagcggatccccagcgcgcaaccaccccccgcctgcctgcccaaagcaccgggactggagcacggagacctaccagggatgtaccctgcccacatgtaccaagtgtacaagtcaagacggggaataaagcggagcgaggacagcaaggagacctacaaattgccgcaccggctcatcgagaaaaagagacgtgaccggattaacgagtgcatcgcccagctgaaggatctcctacccgaacatctcaaacttacaactttgggtcacttggaaaaagcagtggttcttgaacttaccttgaagcatgtgaaagcactaacaaacctaattgatcagcagcagcagaaaatcattgccctgcagagtggtttacaagctggtgagctgtcagggagaaatgtcgaaacaggtcaagagatgttctgctcaggtttccagacatgtgcccgggaggtgcttcagtatctggccaagcacgagaacactcgggacctgaagtcttcgcagcttgtcacccacctccaccgggtggtctcggagctgctgcagggtggtacctccaggaagccatcagacccagctcccaaagtgatggacttcaaggaaaaacccagctctccggccaaaggttcggaaggtcctgggaaaaactgcgtgccagtcatccagcggactttcgctcactcgagtggggagcagagcggcagcgacacggacacagacagtggctatggaggagaatcggagaagggcgacttgcgcagtgagcagccgtgcttcaaaagtgaccacggacgcaggttcacgatgggagaaaggatcggcgcaattaagcaagagtccgaagaaccccccacaaaaaagaaccggatgcagctttcggatgatgaaggccatttcactagcagtgacctgatcagctccccgttcctgggcccacacccacaccagcctcctttctgcctgcccttctacctgatcccaccttcagcgactgcctacctgcccatgctggagaagtgctggtatcccacctcagtgccagtgctatacccaggcctcaacgcctctgccgcagccctctctagcttcatgaacccagacaagatctcggctcccttgctcatgccccagagactcccttctcccttgccagctcatccgtccgtcgactcttctgtcttgctccaagctctgaagccaatcccccctttaaacttagaaaccaaagactaaactctctaggggatcctgctgctttgctttccttcctcgctacttcctaaaaagcaacaaaaaagtttttgtgaatgctgcaagattgttgcattgtgtatactgagataatctgaggcatggagagcagattcagggtgtgtgtgtgtgtgtgtgtgtgtgtgtgtatgtgcgtgtgcgtgcacatgtgtgcctgcgtgttggtataggactttaaagctccttttggcatagggaagtcacgaaggattgcttgacatcaggagacttgggggggattgtagcagacgtctgggcttttccccacccagagaatagcccccttcgatacacatcagctggattttcaaaagcttcaaagtcttggtctgtgagtcactcttcagtttgggagctgggtctgtggctttgatcagaaggtactttcaaaagagggctttccagggctcagctcccaaccagctgttaggaccccacccttttgcctttattgtcgacgtgactcaccagacgtcggggagagagagcagtcagaccgagctttctgctaacatggggaggtagcaggcactggcatagcacggtagtggtttggggaggtttccgcaggtctgctccccacccctgcctcggaagaataaagagaatgtagttccctactcaggctttcgtagtgattagcttactaaggaactgaaaatgggccccttgtacaagctgagctgccccggagggagggaggagttccctgggcttctggcacctgtttctaggcctaaccattagtacttactgtgcagggaaccaaaccaaggtctgagaaatgcggacaccccgagcgagcaccccaaagtgcacaaagctgagtaaaaagctgcccccttcaaacagaactagactcagttttcaattccatcctaaaactccttttaaccaagcttagcttctcaaaggcctaaccaagccttggcaccgccagatcctttctgtaggctaattcctcttgcccaacggcatatggagtgtccttattgctaaaaaggattccgtctccttcaaagaagttttatttttggtccagagtacttgttttcccgatgtgtccagccagctccgcagcagcttttcaagatgcactatgcctgattgctgatcgtgttttaactttttcttttcctgtttttattttggtattaagtcgttgcctttatttgtaaagctgttataaatatatattatataaatatattaaaaaggaaaatgtttcagatgtttatttgtataattacttgattcacacagtgagaaaaaatgaatgtattcctgtttttgaagagaagaataatttttttttctctagggagaggtacagtgtttatattttggagccttcctgaaggtgtaaaattgtaaatatttttatctatgagtaaatgttaagtagttgttttaaaatacttaataaaataattcttttcctgtggaag

SEQ ID NO: 682 - DNA, 60 bp, Homo sapiens
gactcagttttcaattccatcctaaaactccttttaaccaagcttagcttctcaaaggcc

SEQ ID NO: 683 - DNA, 1342 bp, Homo sapiens
cccggagccggaccggggccaccgcgcccgctctgctccgacaccgcgccccctggacagccgccctctcctccaggcccgtggggctggccctgcaccgccgagcttcccgggatgagggcccccggtgtggtcacccggcgcgccccaggtcgctgagggaccccggccaggcgcggagatgggggtgcacgaatgtcctgcctggctgtggcttctcctgtccctgctgtcgctccctctgggcctcccagtcctgggcgccccaccacgcctcatctgtgacagccgagtcctggagaggtacctcttggaggccaaggaggccgagaatatcacgacgggctgtgctgaacactgcagcttgaatgagaatatcactgtcccagacaccaaagttaatttctatgcctggaagaggatggaggtcgggcagcaggccgtagaagtctggcagggcctggccctgctgtcggaagctgtcctgcggggccaggccctgttggtcaactcttcccagccgtgggagcccctgcagctgcatgtggataaagccgtcagtggccttcgcagcctcaccactctgcttcgggctctgcgagcccagaaggaagccatctcccctccagatgcggcctcagctgctccactccgaacaatcactgctgacactttccgcaaactcttccgagtctactccaatttcctccggggaaagctgaagctgtacacaggggaggcctgcaggacaggggacagatgaccaggtgtgtccacctgggcatatccaccacctccctcaccaacattgcttgtgccacaccctcccccgccactcctgaaccccgtcgaggggctctcagctcagcgccagcctgtcccatggacactccagtgccagcaatgacatctcaggggccagaggaactgtccagagagcaactctgagatctaaggatgtcacagggccaacttgagggcccagagcaggaagcattcagagagcagctttaaactcagggacagagccatgctgggaagacgcctgagctcactcggcaccctgcaaaatttgatgccaggacacgctttggaggcgatttacctgttttcgcacctaccatcagggacaggatgacctggagaacttaggtggcaagctgtgacttctccaggtctcacgggcatgggcactcccttggtggcaagagcccccttgacaccggggtggtgggaaccatgaagacaggatgggggctggcctctggctctcatggggtccaagttttgtgtattcttcaacctcattgacaagaactgaaaccaccaaaaaaaaaaaaaa

SEQ ID NO: 684 - DNA, 60 bp, Homo sapiens
tcatggggtccaagttttgtgtattcttcaacctcattgacaagaactgaaaccaccaaa

SEQ ID NO: 685 - DNA, 1563 bp, Homo sapiens
cgccgagctgggccaatcctcttggtggaggaagctcggctgattctcggctcacgcgggaggggagtaaagggtggcggtccgggcctggagttcagtgggtgcagcctgcttgcgagctgaggccagacaggggggcgcctacggacggaaaagaaaagttgattacaaacgggaccatattttgcttcgaaatggaaccagcagttagcgagccaatgagagaccaagtcgcacggactcatttgacagaggacactcccaaagtgaatgctgacatagaaaaggttaaccagaatcaggccaagagatgcacagtgatcggtggctctggattcctggggcagcacatggtggagcagttgctggcaagaggatatgctgtcaatgtatttgatatccagcaagggtttgataatccccaggtgcggttctttctgggtgacctctgcagccgacaggatctgtacccagctctgaaaggtgtaaacacagttttccactgtgcgtcacccccaccatccagtaacaacaaggagctcttttatagagtgaattacattggcaccaagaatgtcattgaaacttgcaaagaggctggggttcagaaactcattttaaccagcagtgccagtgtcatctttgagggcgtcgatatcaagaatggaactgaagaccttccctatgccatgaaacccattgactactacacagagactaagatcttacaggagagggcagttctgggcgccaacgatcctgagaagaatttcttaaccacagccatccgccctcatggcattttcggcccaagggacccgcagttggtacccatcctcatcgaggcagccaggaacggcaagatgaagttcgtgattggaaatgggaagaacttggtggacttcacctttgtggagaacgtggtccatggacacatcctggcggcagagcagctctcccgagactcgacactgggtgggaaggcatttcacatcaccaatgatgagcccatccctttctggacattcctgtctcgcatcctgacaggcctcaattatgaggcccccaagtaccacatcccctactgggtggcctactacctggccctcctgctatccctgctggtgatggtgatcagtcctgtcatccagctgcagcccaccttcacacccatgcgggtcgcactggctggcacattccactactacagctgcgagagagccaaaaaggccatgggctaccagccactagtgaccatggatgatgctatggagaggaccgtgcagagctttcgccacctgcggagggtcaagtgagggacactggaggctgggctctctcgacacgttgctcagccagtcactccttcccctgtggattgatgaaataacatcctttgaatgagtttgctctgagcctgtgactccttctgctaggcagagagcgcaccctactctttccgtgacgatgagggcggcaaaaacagacatttcttccttcatggaactggatttggatttcttgaagcaggcagcttcatattataccgatttgttctctgtc

SEQ ID NO: 686 - DNA, 60 bp, Homo sapiens
acgatgagggcggcaaaaacagacatttcttccttcatggaactggatttggatttcttg

SEQ ID NO: 687 - DNA, 1965 bp, Homo sapiens
gagagggtgccagcggccgcagctgaagttgggccgagagccggcgacggccccgcgccggggtcgcaggcctgcaggagttgagggctgcacctgctcgctggagagggagaggcagatttagtggacgcctggcatggactcggactggcctttggaagctccctgccctgacggggttgcctgtcaccactgcgaagtgaggcttggcaggacctgcacctgagaaaggccgtgtgtggtcttggggtccacacctgcagagctaacttactgccagacggcgacttactgtgggccaccctcagtgaaccggggtgtcctcagctggccctacagagcacttctgtgctggggatgagtaggaattctgggcgaggagggtcccagcgccgcccctcgatacagcctggctctgccctctgcccgtacttataccaggtgggatccctgccctgcattgcctggggattggctgggcttgggcccgccctgctgtggaactggatgttttcagggagcccagcctttcctcatgtcaacacagttcacaatatagttttcaaagtacagtttaaaactcaaaagtaaacttttcagcaactcaaaggtttgctgagtgatctgaagcactctggccactttttggggccatgggatttggttcacctgaaacagccagtgagaggccgggtgtggtggctcacacccgtaatcccaacacttcaggaggcagacgcgggtgatcgctcacttgagatcaggagttcaagaccagcctgggcaacatggtgaaacctcgtctctactaaaaatacaaaaattagctaggcatggtggtgggcacctgtaatcccagctacttggaaggctgaggcaagagaatcgcttgaacctgggaggtggaggttgcagcgagacgagattacgccgctgcactccagcctgggtgacgagagactctgcctcaaaaaaataaaaaaatgaaacagccagtgaggaggaaggctccccgccttccccccgccggaacatagccatagctgctgctgggacaccctcttggtggggaagaagactggttagcttcatcagagccagcagcagcagaccagggacgggcacctaggcagtggcctcagagtgaacaggagttcctcagaaacacacacagggacggcgtggcgcatgctctgccagctccatgcctccttcccattgtggggctgggctacgtagggcagagctcatgacctccgggaggacatgggggtgggctctggatggcacctggcattgccccctgctggcctatgtgacggtgtggagggctggtcacagaggtacgaccatcccttcagaatgtgggtcggggctgtggatggaggagtaggcccctcatatcccaggcctgctgcccaggcacaacccacttggcctatgcattccaggctccatcccatgtgactctgggcttagccccttctggggccacaggtcaggcaggtccaggccccaaggacctcccagtgacaggcgactgtgagctgggcagacaggagtgaagtcaggtgggggttctggcttgctgacaccagcgtttggagcctcctgctgctgcctggcttccctgcattccctgttccctgcctcaggcaagaaataaccaagccgagttgcctctgcacagcagtgagctcctggtggccctggcttctggggagccctgtggatggcttccttgcccaagtcaaggccttcttgttccctttgtgtgctccagagaaagggggcagcaccagatccagatccagggccaaccaacagaaagctgagtccatcccaaactcgcccattctcagagcacaaagaccccatgatctagggcaaacttgtccaactgttggcccatggaacagctttgaatgcagcccaacacaaatctataaattttcttaaacattg

SEQ ID NO: 688 - DNA, 60 bp, Homo sapiens
cagcctttcctcatgtcaacacagttcacaatatagttttcaaagtacagtttaaaactc

SEQ ID NO: 689 - DNA, 1453 bp, Homo sapiens
agtgcgcgaagatgcgaaaggtggttttgatcaccggggctagcagtggcattggcctggccctctgcaagcggctgctggcggaagatgatgagcttcatctgtgtttggcgtgcaggaacatgagcaaggcagaagctgtctgtgctgctctgctggcctctcaccccactgctgaggtcaccattgtccaggtggatgtcagcaacctgcagtcggtcttccgggcctccaaggaacttaagcaaaggtttcagagattagactgtatatatctaaatgctgggatcatgcctaatccacaactaaatatcaaagcacttttctttggcctcttttcaagaaaagtgattcatatgttctccacagctgaaggcctgctgacccagggtgataagatcactgctgatggacttcaggaggtgtttgagaccaatgtctttggccattttatcctgattcgggaactggagcctctcctctgtcacagtgacaatccatctcagctcatctggacatcatctcgcagtgcaaggaaatctaatttcagcctcgaggacttccagcacagcaaaggcaaggaaccctacagctcttccaaatatgccactgaccttttgagtgtggctttgaacaggaacttcaaccagcagggtctctattccaatgtggcctgtccaggtacagcattgaccaatttgacatatggaattctgcctccgtttatatggacgctgttgatgccggcaatattgctacttcgcttttttgcaaatgcattcactttgacaccatataatggaacagaagctctggtatggcttttccaccaaaagcctgaatctctcaatcctctgatcaaatatctgagtgccaccactggctttggaagaaattatattatgacccagaagatggacctagatgaagacactgctgaaaaattttatcaaaagttactggaactggaaaagcacattagggtcactattcaaaaaacagataatcaggccaggctcagtggctcatgcctataattccagcactttgggaggccaaggcagaaggatcacttgagaccaggagttcaagaccagcctgagaaacatagtgagcccttgtctctacaaaaagaaataaaaataatagctgggtgtggtggcatgcgcatgtagtcccagctactcagaaggatgaggtgggaggatctcttgaggctgggaggcagaggttgcagtgagctgagattgtgccactgcactccagcctgggtgacagcgagaccctgtctcaaaatatgtatatatttaatatatatataaaaccagagctgacaatgacactctggaacattgcataccttctgtacattctggggtacatggatttctactgagttggataatatgcatttgtaataaactatgaactatgaaaaaaaaaaaaaaaaaaa

SEQ ID NO: 690 - DNA, 60 bp, Homo sapiens
acactctggaacattgcataccttctgtacattctggggtacatggatttctactgagtt

SEQ ID NO: 691 - DNA, 2264 bp, Homo sapiens
actgttgagagcggtgtgaggtgcttggtagcgcgccgtagctgcttccacgtccttgcttcacctcaggtaaagagagaagtaatggaaggcctgtctgatgttgcttcttttgcaactaaacttaaaaacactctcatccagtaccatagcattgaagaagataagtggcgagttgctaagaaaacgaaagatgtaactgtttggagaaaaccctcagaagaatttaatggatatctctacaaagcccaaggtgttatagatgaccttgtctatagtataatagaccatatacgcccagggccttgtcgtttggattgggacagcttgatgacttctttggatattctggagaactttgaagagaattgctgtgtgatgcgttacactactgctggtcagctttggaatataatttccccaagagaatttgttgatttctcctatactgtgggctataaagaagggcttttatcttgtggaataagtcttgactgggatgaaaagagaccagaatttgttcgaggatataaccatccctgtggttggttttgtgttccacttaaagacaacccaaaccagagtcttttgacaggatatattcagacagatctgcgtgggatgattcctcagtctgcggtagatacagccatggcaagcactttaaccaacttctatggtgatttacgaaaagctttatgagaggcaaaatacattcaaacttgtagtactacagatcaactctctcagctacatggcctgtaaaaatcattgattccacttttctgcatagccggtagaaaaatttgaaatgtttttggttcactagtacaatgtttggttttattcctaaagtaaatagctatctaagagagggcattttcacttttttttttttaaattttgagacaggctctcactctgttgcccatgctggagggcagtggtatgatcacagctcactgcagctttgatctgaccgctcaaggggttattctacctcagcctcctgaatagctgggaatacaggtgcacgccactatgcatggctaatttttgtttaattttttgtagagatgtggtcacactgtgttgcccaggctggtcttgaactcctggcctcaagtcattccccaccttagcctcccaaagtgttgggattataagcgtgagccaccatgcctggccccaatttaaaatgtggaattcagttggtgtccaagacttatcttgagactcttaaaagcatcagtctgtaactagaacaaatacagtcttagatttacccaagtgcctagatatcattttataatgattagaattgagtattgtgggtcccctaattctgtgggtgccttaagtgagaatttctaaatgattttcacattctaaatgactttgggttttgaactctccatctagtttacttctaaaatgggaacttgaggcaattcaggtatccaggcaaatctttgtatatatttttttgtgtacatgcacacatctcgaaatccatttccgtgtttaatgttagttgtttatgtgttagtattcctgtgtctactgttttgttgttgttaatatgggtaaagtgagccctgaaatacatgctaaacaagacatgaaattcagaaaggtacatagtgtttcaagtgcatggtagtttgatctgtgttttactttattgtgttttcttgagtgtaaagaaagaataaatcaaagttcttcatacccattttgacaaagtggaacagtggagctgttttttgcttttgtttttatttattttttgccactggtgatgatagatttcaaaaaacaaaaggtggcagcagcacaatgttcatggtgaattatctcatagtatctagattgatcaagatctgacagaaggaatgcacaaaggattctatattcttaatgatttattaattaccaggatccttttctaaattgaatgtacttttgaattactaggtttcttctttttttttgttctgcaatagtgaaagaaaactcagtagtttagtttcagtttctcatggaaattggtaaatgttagttttgacttcatctattttttatttgtttttattagcgtagagtaggaagtctcatattctactgttctatctaggatggtgaaattccaaaggtgcctaacttgagtaagggatttgtgacaagatagtacacattactataagggctattatttcctgaactggatgtccctaaaagcaaataaactgcccactatctct

SEQ ID NO: 692 - DNA, 60 bp, Homo sapiens
agggctgagtaattgcctttcatacaaataaaagctttaactcttttctcaagagtgtac

SEQ ID NO: 693 - DNA, 2077 bp, Homo sapiens
ggcacgaggcactccctttcctctgctgccgctcggtcacgcttgtgcccgaaggaggaaacagtgacagacctggagactgcagttctctatccttcacacagctctttcaccatgcctggatcacttcctttgaatgcagaagcttgctggccaaaagatgtgggaattgttgcccttgagatctattttccttctcaatatgttgatcaagcagagttggaaaaatatgatggtgtagatgctggaaagtataccattggcttgggccaggccaagatgggcttctgcacagatagagaagatattaactctctttgcatgactgtggttcagaatcttatggagagaaataacctttcctatgattgcattgggcggctggaagttggaacagagacaatcatcgacaaatcaaagtctgtgaagactaatttgatgcagctgtttgaagagtctgggaatacagatatagaaggaatcgacacaactaatgcatgctatggaggcacagctgctgtcttcaatgctgttaactggattgagtccagctcttgggatggacggtatgccctggtagttgcaggagatattgctgtatatgccacaggaaatgctagacctacaggtggagttggagcagtagctctgctaattgggccaaatgctcctttaatttttgaacgagggcttcgtgggacacatatgcaacatgcctatgatttttacaagcctgatatgctatctgaatatcctatagtagatggaaaactctccatacagtgctacctcagtgcattagaccgctgctactctgtctactgcaaaaagatccatgcccagtggcagaaagagggaaatgataaagattttaccttgaatgattttggcttcatgatctttcactcaccatattgtaaactggttcagaaatctctagctcggatgttgctgaatgacttccttaatgaccagaatagagataaaaatagtatctatagtggcctggaagcctttggggatgttaaattagaagacacctactttgatagagatgtggagaaggcatttatgaaggctagctctgaactcttcagtcagaaaacaaaggcatctttacttgtatcaaatcaaaatggaaatatgtacacatcttcagtatatggttcccttgcatctgttctagcacagtactcacctcagcaattagcagggaagagaattggagtgttttcttatggttctggtttggctgccactctgtactctcttaaagtcacacaagatgctacaccggggtctgctcttgataaaataacagcaagtttatgtgatcttaaatcaaggcttgattcaagaactggtgtggcaccagatgtcttcgctgaaaacatgaagctcagagaggacacccatcatttggtcaactatattccccagggttcaatagattcactctttgaaggaacgtggtacttagttagggtggatgaaaagcacagaagaacttacgctcggcgtcccactccaaatgatgacactttggatgaaggagtaggacttgtgcattcaaacatagcaactgagcatattccaagccctgccaagaaagtaccaagactccctgccacagcagcagaacctgaagcagctgtcattagtaatggggaacattaagatactctgtgaggtgcaagacttcagggtggggtgggcatggggtgggggtatgggaacagttggaggaatgggatatctggggataattttaaaggattacatgttatgtaaatttttatgtgactgacatggagcctggatgactatcgtgtacttgggaaagtctctttgctctatttgctgacatgcttcctgttgtggtctggccaatgccaaatgtactcgaatgatgttaagggctctgtaaaacttcatacctctttggccatttgtatgcatgatgtttggtttttaaacatggtataatgaattgtgtacttctgtcagaagaaagcagaggtactaatctccaattaaaaaattttttaacatgtaaaaaaaaaaaaaaaaaaaaaaa

SEQ ID NO: 694 - DNA, 60 bp, Homo sapiens
taaaataacagcaagtttatgtgatcttaaatcaaggcttgattcaagaactggtgtggc

SEQ ID NO: 695 - DNA, 2205 bp, Homo sapiens
cggcggctgcaggcggcgggcaaggacggcgggcacagcgcagcactccccgctcgttggcccgggtatcccagcgcggacccacgcgatacgctgacgccccgacgccgatccggccgagccaagtaagggggacggcccgagacggagaagggagagagtgggagtttcccagcccgcagaactttcgaagttgagaaaagaacccctggaacgtgcgctcagcactgggattttctggactcaacgatgactctgaataatgtcaccatgcgccagggcactgtgggcatgcagccacagcagcagcgctggagcatcccagctgatggcaggcatctgatggtccagaaagagccccaccagtacagccaccgcaaccgccattctgctacccctgaggaccactgccgccgaagctggtcctctgactccacagactcagtcatctcctctgagtcagggaacacctactaccgagtggtgctcataggggagcagggggtgggcaagtccactctggccaacatctttgcaggtgtgcatgacagcatggacagcgactgcgaggtgctgggagaagatacatatgaacgaaccctgatggttgatggggaaagtgcaacgattatactcctggatatgtgggaaaataagggggaaaatgaatggctccatgaccactgcatgcaggtcggggacgcatacctgattgtctactcaatcacagaccgagcgagcttcgagaaggcatctgagctgcgaatccagctccgcagggcccggcagacagaggacattcccataattttggttggcaacaaaagtgacttagtgcggtgccgagaagtgtctgtatcagaagggagagcctgtgcagtggtgtttgactgcaagttcatcgagacctctgcagctgtccagcacaacgtgaaggagctgtttgagggcattgtgcgacaggtgcgccttcggcgggacagcaaggagaagaatgaacggcggctggcctaccagaaaaggaaggagagcatgcccaggaaagccaggcgcttctggggcaagatcgtggccaaaaacaacaagaatatggccttcaagctcaagtccaaatcctgccatgacctctctgtactctaggaacccagggtcacccagatgtccctttgatggccgttgttgaaggccattgggaccaataatctatattagattgaatacttaagttagatgtggtttcccccattgtagcagggagctagcgtattagccttgtgggcaacatgatgcatgggaaatgaaagatttttgtaaaaagtcagtatttatttccaggaaaagcctgaccttgctatttgaacacccaagactctttagaggatgtgtttggtgttcacatgtgtttcttctattttggatagtagagaagtaaagcttacaaagaatgcctagaacaagaacttttcatcattaaaaatttttcccagtgttctgatatgtgactttgaggccaatgagtcataaacaaatataagaaagctgtcaatgagtttcttcaaaggagggaaaactttctacgaatctaagatccatggagctagaattgtagaactaggctcatcagaatcgtgactattattgctccatcaaactgtgaaaagaaatgatgtggaccttgctggaaacaaaggcttagcaaacaatttttgttcaatgcccaccaagacatatagaattgggaactgatacatgtgtcccttataggctcaaaaattatatcttacaatttcttatttagggggaaattatttgaatcagattctatttagtcaaaccaccttttatgttttattatttttgaattcatggagccatcataaaaatatttttaaaatcagaattattgataccctgtagtgcaaaatgtcaatttttaatgtataatcagaagtctgaatttttataaaacatatagcataaaaacttccagtactttggttgacccttgtatgtcacagctctgctctatttattattattttgcaaaataaccattttaacatttgataaagcatatttatgaacatatttcttaataagaaaaatatccattttattaccattttctatctttttcaaaatatgcaagtttttacctatatgtcttataataaaagaaataaaatatttgaaaaaaaaaaaaaa

SEQ ID NO: 696 - DNA, 60 bp, Homo sapiens
actaggctcatcagaatcgtgactattattgctccatcaaactgtgaaaagaaatgatgt

SEQ ID NO: 697 - DNA, 4471 bp, Homo sapiens
ttcggtggcctctagtgagatctggaggatccaaggattctgtagctacaatgttgtcaagactttttcgaatgcatggcctctttgtggcctcccatccctgggaagtcatagtggggacagtgacactgaccatctgcatgatgtccatgaacatgtttactggtaacaataagatctgtggttggaattatgaatgtccaaagtttgaagaggatgttttgagcagtgacattataattctgacaataacacgatgcatagccatcctgtatatttacttccagttccagaatttacgtcaacttggatcaaaatatattttgggtattgctggccttttcacaattttctcaagttttgtattcagtacagttgtcattcacttcttagacaaagaattgacaggcttgaatgaagctttgccctttttcctacttttgattgacctttccagagcaagcacattagcaaagtttgccctcagttccaactcacaggatgaagtaagggaaaatattgctcgtggaatggcaattttaggtcctacgtttaccctcgatgctcttgttgaatgtcttgtgattggagttggtaccatgtcaggggtacgtcagcttgaaattatgtgctgctttggctgcatgtcagttcttgccaactacttcgtgttcatgactttcttcccagcttgtgtgtccttggtattagagctttctcgggaaagccgcgagggtcgtccaatttggcagctcagccattttgcccgagttttagaagaagaagaaaataagccgaatcctgtaactcagagggtcaagatgattatgtctctaggcttggttcttgttcatgctcacagtcgctggatagctgatccttctcctcaaaacagtacagcagatacttctaaggtttcattaggactggatgaaaatgtgtccaagagaattgaaccaagtgtttccctctggcagttttatctctctaaaatgatcagcatggatattgaacaagttattaccctaagtttagctctccttctggctgtcaagtacatcttctttgaacaaacagagacagaatctacactctcattaaaaaaccctatcacatctcctgtagtgacacaaaagaaagtcccagacaattgttgtagacgtgaacctatgctggtcagaaataaccagaaatgtgattcagtagaggaagagacagggataaaccgagaaagaaaagttgaggttataaaacccttagtggctgaaacagataccccaaacagagctacatttgtggttggtaactcctccttactcgatacttcatcagtactggtgacacaggaacctgaaattgaacttcccagggaacctcggcctaatgaagaatgtctacagatacttgggaatgcagagaaaggtgcaaaattccttagtgatgctgagatcatccagttagtcaatgctaagcatatcccagcctacaagttggaaactctgatggaaactcatgagcgtggtgtatctattcgccgacagttactttccaagaagctttcagaaccttcttctctccagtacctaccttacagggattataattactccttggtgatgggagcttgttgtgagaatgttattggatatatgcccatccctgttggagtggcaggacccctttgcttagatgaaaaagaatttcaggttccaatggcaacaacagaaggttgtcttgtggccagcaccaatagaggctgcagagcaataggtcttggtggaggtgccagcagccgagtccttgcagatgggatgactcgtggcccagttgtgcgtcttccacgtgcttgtgactctgcagaagtgaaagcctggctcgaaacatctgaagggttcgcagtgataaaggaggcatttgacagcactagcagatttgcacgtctacagaaacttcatacaagtatagctggacgcaacctttatatccgtttccagtccaggtcaggggatgccatggggatgaacatgatttcaaagggtacagagaaagcactttcaaaacttcacgagtatttccctgaaatgcagattctagccgttagtggtaactattgtactgacaagaaacctgctgctataaattggatagagggaagaggaaaatctgttgtttgtgaagctgtcattccagccaaggttgtcagagaagtattaaagactaccacagaggctatgattgaggtcaacattaacaagaatttagtgggctctgccatggctgggagcataggaggctacaacgcccatgcagcaaacattgtcaccgccatctacattgcctgtggacaggatgcagcacagaatgttggtagttcaaactgtattactttaatggaagcaagtggtcccacaaatgaagatttatatatcagctgcaccatgccatctatagagataggaacggtgggtggtgggaccaacctactacctcagcaagcctgtttgcagatgctaggtgttcaaggagcatgcaaagataatcctggggaaaatgcccggcagcttgcccgaattgtgtgtgggaccgtaatggctggggaattgtcacttatggcagcattggcagcaggacatcttgtcaaaagtcacatgattcacaacaggtcgaagatcaatttacaagacctccaaggagcttgcaccaagaagacagcctgaatagcccgacagttctgaactggaacatgggcattgggttctaaaggactaacataaaatctgtgaattaaaaaagctcaatgcattgtcttgtggaggatgaataaatgtgatcactgagacagccacttggtttttggctctttcagagaggtctcaggttctttccatgcagactcctcagatctgaacacagtttagtgctttacatgctgtgctctttgaagagatttcaacaagaatattgtatgttaaagcatcagagatggtaatctacagctcacctctgaaagcaaatataagctgggaaaaaagttttgatgaaattcttgaagttcatggtgatcagtgcaattgaccttctccctcactcctgccagttgaaaatggatttttaaattatactgtagctgatgaaactcctgattttgtagttaatttattaagtctgggatgtagaacttcaagaagtaagagctaagttctaagttcatgtttgtaaattaatacttcatttggtgctggtctattttgattttggggggtaatcagcattattcttcagaaggggacctgttttcttcaagggaagaaacactcttattcccaaactacagaataatgtgttaaacatgctaaatagttctatcaggaaaacaaatcactgtatttatctccgcaggctatttgttcagagaggccttttgtttaaatataaatgtttaaatataaatgtttgtctggattggctataacatgtctttcagcattaggcttttaagaaacacagggttttgtattctttactaaagatatcagagctcttaatgttgcttagatgagggtgactgtcaagtacaagcaagactgggaccttagaaatcattgtagaaacacagttttgaaagatttttaccatgtctctaagccaactttaattgcttaaaagacatttttatttagttgaaaaatctagttttttttgtaaactgtaccaaatctgtatatgttgtaataaaacttatgctagtttattggaagtgttcaagaaataaaaatcaacttgtgtactgataaaatactctagcctgggccagagaagataatgttctttaatgttgtcaggaaaccctggcttgcttgccgagcctaatgaaagggaaagtcagctttcagagccagtgaaggagccacgtgaatggccctagaactgtgcctagttcctgtggccaggaggttggtgactgaaacattcacacagggctcttggatggacccacgaacgctcttagctttctcagggggtcagcagagttattgaatcttaattttttttaatgtacaagttttgtataaataataaagaactccttattttgtattacatctaatgcttaagtgttgctcttggaaagctgatgatgtctcttgtagagatgactctgaaaaacattccaggaaaccatggcagcatggagagcctcttagtgattgtgtctgcattgttattgtggaagatttaccttttctgttgtacgtaaagcttaaattacttttgttgtgactttttagccagtgactttttctgagcttttcatggaagtggcagtgaaaaatatgttgagtgttcaaaaaagtgactgtaattaatatcttgctggattaatgttttgtacaattactaaattgtatacattttgttatagaatacttttttctagtttcagtaaataatgaaaaggaagttaatacca

SEQ ID NO: 698 - DNA, 60 bp, Homo sapiens
gctcttggaaagctgatgatgtctcttgtagagatgactctgaaaaacattccaggaaac

SEQ ID NO: 699 - DNA, 2084 bp, Homo sapiens
aaccgcatctgcagcgagcaactgagaagccaagactgagccggcggccgcggcgcagcgaacgagcagtgaccgtgctcctacccagctctgcttcacagcgcccacctgtctccgcccctcggcccctcgcccggctttgcctaaccgccacgatgatgttctcgggcttcaacgcagactacgaggcgtcatcctcccgctgcagcagcgcgtccccggccggggatagcctctcttactaccactcacccgcagactccttctccagcatgggctcgcctgtcaacgcgcaggacttctgcacggacctggccgtctccagtgccaacttcattcccacggtcactgccatctcgaccagtccggacctgcagtggctggtgcagcccgccctcgtctcctctgtggccccatcgcagaccagagcccctcaccctttcggagtccccgccccctccgctggggcttactccagggctggcgttgtgaagaccatgacaggaggccgagcgcagagcattggcaggaggggcaaggtggaacagttatctccagaagaagaagagaaaaggagaatccgaagggaaaggaataagatggctgcagccaaatgccgcaaccggaggagggagctgactgatacactccaagcggagacagaccaactagaagatgagaagtctgctttgcagaccgagattgccaacctgctgaaggagaaggaaaaactagagttcatcctggcagctcaccgacctgcctgcaagatccctgatgacctgggcttcccagaagagatgtctgtggcttcccttgatctgactgggggcctgccagaggttgccaccccggagtctgaggaggccttcaccctgcctctcctcaatgaccctgagcccaagccctcagtggaacctgtcaagagcatcagcagcatggagctgaagaccgagccctttgatgacttcctgttcccagcatcatccaggcccagtggctctgagacagcccgctccgtgccagacatggacctatctgggtccttctatgcagcagactgggagcctctgcacagtggctccctggggatggggcccatggccacagagctggagcccctgtgcactccggtggtcacctgtactcccagctgcactgcttacacgtcttccttcgtcttcacctaccccgaggctgactccttccccagctgtgcagctgcccaccgcaagggcagcagcagcaatgagccttcctctgactcgctcagctcacccacgctgctggccctgtgagggggcagggaaggggaggcagccggcacccacaagtgccactgcccgagctggtgcattacagagaggagaaacacatcttccctagagggttcctgtagacctagggaggaccttatctgtgcgtgaaacacaccaggctgtgggcctcaaggacttgaaagcatccatgtgtggactcaagtccttacctcttccggagatgtagcaaaacgcatggagtgtgtattgttcccagtgacacttcagagagctggtagttagtagcatgttgagccaggcctgggtctgtgtctcttttctctttctccttagtcttctcatagcattaactaatctattgggttcattattggaattaacctggtgctggatattttcaaattgtatctagtgcagctgattttaacaataactactgtgttcctggcaatagtgtgttctgattagaaatgaccaatattatactaagaaaagatacgactttattttctggtagatagaaataaatagctatatccatgtactgtagtttttcttcaacatcaatgttcattgtaatgttactgatcatgcattgttgaggtggtctgaatgttctgacattaacagttttccatgaaaacgttttattgtgtttttaatttatttattaagatggattctcagatatttatatttttattttatttttttctaccttgaggtcttttgacatgtggaaagtgaatttgaatgaaaaatttaagcattgtttgcttattgttccaagacattgtcaataaa

SEQ ID NO: 700 - DNA, 60 bp, Homo sapiens
atggagtgtgtattgttcccagtgacacttcagagagctggtagttagtagcatgttgag

SEQ ID NO: 701 - DNA, 2277 bp, Homo sapiens
acgccctatacaacttggcttcacatacttttacactaactttatatgatttttaaaaactggtctgatcggacttctcgtcctgggacactgtttactggagtctggccggctctccgtgctcctcttggtacctcattttggggagaaccttaaacccactcgagcagataatctccgccttgaccggtgccaccaaagaagggttggaaccatgtggacttttctgggcattgccactttcacctatttttataagaagttcggggacttcatcactttggccaacagggaggtcctgttgtgcgtgctggtgttcctctcgctgggcctggtgctctcctaccgctgtcgccaccgaaacgggggtctcctcgggcgccagcggagcggctcccagttcgccctcttctcggatattctctcaggcctgcctttcattggcttcttctgggccaaatccccccctgaatcagaaaataaggagcagctcggggccaggaggcgcagaaaaggaaccaatatttcagaaacaagcttaataggaacagctgcctgtacatcaacatcttctcagaatgacccagaagttatcatcgtgggagctggcgtgcttggctctgctttggtagctgtgctttccagagatggaagaaaggtgacagtcattgagagagacttaaaagagcctgacagaatagttggagaattcctgcagccgggtggttatcatgttctcaaagaccttggtcttggagatacagtggaaggtcttgatgcccaggttgtaaatggttacatgattcatgatcaggaaagcaaatcagaggttcagattccttaccctctgtcagaaaacaatcaagtgcagagtggaagagctttccatcacggaagattcatcatgagtctccggaaagcagctatggcagagcccaatgcaaagtttattgaaggtgttgtgttacagttattagaggaagatgatgttgtgatgggagttcagtacaaggataaagagactggagatatcaaggaactccatgctccactgactgttgttgcagatgggcttttctccaagttcaggaaaagcctggtctccaataaagtttctgtatcatctcattttgttggctttcttatgaagaatgcaccacagtttaaagcaaatcatgctgaacttattttagctaacccgagtccagttctcatctaccggatttcatccagtgaaactcgagtacttgttgacattagaggagaaatgccaaggaatttaagagaatacatggttgaaaaaatttacccacaaatacctgatcacctgaaagaaccattcttagaagccactgacaattctcatctgaggtccatgctagcaagcttccttcctccttcatcagtgaagaaacgaggtgttcttcttttgggagacgcatataatatgaggcatccacttactggtggaggaatgactgttgcttttaaagatataaaactatggagaaaactgctaaagggtatccctgacctttatgatgatgcagctattttcgaggccaacaaatcattttactgggcaagaaaaacatctcattcctttgtcgtgaatatccttgctcaggctctttatgaattattttctgccacagatgattccctgcatcaactaagaaaagcctgttttctttatttcaaacttggtggcgaatgtgttgcgggtcctgttgggctgctttctgtattgtctcctaaccctctagctttaattggacacttctttgctgttgcaatctatgccgtgtatttttgctttaagtcagaaccttggattacaaaacctcgagcccttctcagtagtagtgctgtattgtacaaagcgtgttctgtaatatttcctctaatttactcagaaatgaagtatatggttcattaagcttaaaggggaaccatttgtgaatgaatatttggaacttaccaagtcctaagagacttttggaagaggatatatatagcatagtaccataccacttataaagtggaaactcttggaccaagatttggattaatttgtttttgaagttttttgtatataaatatgtaaatacatgctttaatttgcaatttaaaatgaaggggttaaataagttagacatttgaaagaaatgattgttaccataaattagtgctaatgctgaggagaactacagtttttcttttgaatttagtatttgagatgagttgttgggacatgcaaataaaatgaagaatgac

SEQ ID NO: 702 - DNA, 60 bp, Homo sapiens
gttgcaatctatgccgtgtatttttgctttaagtcagaaccttggattacaaaacctcga

SEQ ID NO: 703 - DNA, 1952 bp, Homo sapiens
tggggagctgctccggcttcggcgcggaggggcggcggccggggaggcggcggcggcggcaggattcccaggagccatgttgtcagaagtcctactggtgtctgctccggggaaagtcatccttcatggagaacatgccgtggtacatggcaaggtagcactggctgtatccttgaacttgagaacattcctccggcttcaaccccacagcaatgggaaagtggacctcagcttacccaacattggtatcaagcgggcctgggatgtggccaggcttcagtcactggacacaagctttctggagcaaggtgatgtcacaacacccacctcagagcaagtggagaagctaaaggaggttgcaggcttgcctgacgactgtgctgtcaccgagcgcctggctgtgctggcctttctttacttatacctgtccatctgccggaagcagagggccctgccgagcctggatatcgtagtgtggtcggagctgccccccggggcgggcttgggctccagcgccgcctactcggtgtgtctggcagcagccctcctgactgtgtgcgaggagatcccaaacccgctgaaggacggggattgcgtcaacaggtggaccaaggaggatttggagctaattaacaagtgggccttccaaggggagagaatgattcacgggaacccctccggagtggacaatgctgtcagcacctggggaggagccctccgataccatcaagggaagatttcatccttaaagaggtcgccagctctccagatcctgctgaccaacaccaaagtccctcgcaataccagggcccttgtggctggcgtcagaaacaggctgctcaagttcccagagatcgtggcccccctcctgacctcaatagatgccatctccctggagtgtgagcgcgtgctgggagagatgggggaagccccagccccggagcagtacctcgtgctggaagagctcattgacatgaaccagcaccatctgaatgccctcggcgtgggccacgcctctctggaccagctctgccaggtgaccagggcccgcggacttcacagcaagctgactggcgcaggcggtggtggctgtggcatcacactcctcaagccagggctggagcagccagaagtggaggccacgaagcaggccctgaccagctgtggctttgactgcttggaaaccagcatcggtgcccccggcgtctccatccactcagccacctccctggacagccgagtccagcaagccctggatggcctctgagaggagcccacgacactgcagccccacccagatgcccctttctggattattctgggggctgcagttcgactctgtgctggccagcgagcgcccagctcctgacactgctggagaggccccagccgcttggcgatgccagccaagctctgcagtcccagcggtgggacctagggaggcatggtctgccctctgcatcctctggagccagccgagcaggaggcctaggagggtcctctgagactccagacctgaggcgagaagggctgcttccctgaagctcccacagtcccatctgcttcaggcccccgccttggcctgtgttcttcctggccgcctgggtccaatgctcaggtgctggggcctggttcccggagaagtgtgccttctctctcccttttcagggacggccccctgtctctcagggccaggcctctccctcctccaggaagccttcccctaccccttgtcgcccctccctcccagagcacctgctgtctgggtggctcactcagcacttggcccttctacctagcgggatggggctcccccaggggctgtcccggaggcggtgggcctggttaaataaggcagtgtggccttggtttatatgcactttcttccgatctgtacctgagaggtttgtggaaaagatggcaaatggggaataaaaagattttgtgtcaac

SEQ ID NO: 704 - DNA, 60 bp, Homo sapiens
ggccttggtttatatgcactttcttccgatctgtacctgagaggtttgtggaaaagatgg

SEQ ID NO: 705 - DNA, 1807 bp, Homo sapiens
tctgtggccggaggctgatcagtgttctagaacagatcagacattttgtaatgatgcctgaaataaacactaaccacctcgacaagcaacaggttcaactcctggcagagatgtgtatccttattgatgaaaatgacaataaaattggagctgagaccaagaagaattgtcacctgaacgagaacattgagaaaggattattgcatcgagcttttagtgtcttcttattcaacaccgaaaataagcttctgctacagcaaagatcagatgctaagattacctttccaggttgttttacgaatacgtgttgtagtcatccattaagcaatccagccgagcttgaggaaagtgacgcccttggagtgaggcgagcagcacagagacggctgaaagctgagctaggaattcccttggaagaggttcctccagaagaaattaattatttaacacgaattcactacaaagctcagtctgatggtatctggggtgaacatgaaattgattacattttgttggtgaggaagaatgtaactttgaatccagatcccaatgagattaaaagctattgttatgtgtcaaaggaagaactaaaagaacttctgaaaaaagcagccagtggtgaaattaagataacgccatggtttaaaattattgcagcgacttttctctttaaatggtgggataacttaaatcatttgaatcagtttgttgaccatgagaaaatatacagaatgtgaatatgtaggtaaatgattacagaaaaatttatgtgcttaacaaacttagaatgactttttccttttaaatttagttctatcattaatttatcattaaatttagttctatcatttggtactatcattaatgtattataaaacttgtgtggaaaaaactaacttataattttgtatcacacaccctggatatgtgttctgtttctaagcgacatttgtgagagattattgtaaaatgagagcgagaaataaaacttaatttaatctttgcagatacatacttatgggaaatttgaacaaatgagtgaaactctgtttttagtaggccgtgataaacatttccggagcacttgcagaggacttgctatttgccaggtgctttatgtatcattaaatttttctcatagttcagaaaaatgtgcaaaggaaactattgtctcgctccttcaaaacagtcttaattaactttcatattagcagattaaactagcagagcaaggttcaaattaaatgatatgaccctaatttgtatcattctgagttgattgtgtggtttattcattctgaaacatgttgatacttacagtcaccgactgcttttgataagtgatattgattaggttgaatcttcttgtaaatagtatttaccagttagcaaagtctgtgttttcagaattacagtgagcacagaggtgttcataaaatgggaattgagtcccactcggtaagagttgcttaaacttgacactgttgacatttgggctggataaaacccctgtggtggggtctgtgctgtgcattgcaggatggtgagcagcgtccctctcatgtgacacccacagttatgccggatgttgccagatgcccctagggacagagtcaacccccaactgaggaccactgtctacagagtcaggaaatattgtagggagaaaaaaataacaacaacaaaggcctatattaatgttaaatagaggagattatggaatgtgtatattaatgttaaaaattattccttattcaatgtatttttatcaaatcgatagatatctcagatttgaaactcaagacag

SEQ ID NO: 706 - DNA, 60 bp, Homo sapiens
cttgtaaatagtatttaccagttagcaaagtctgtgttttcagaattacagtgagcacag

SEQ ID NO: 707 - DNA, 1741 bp, Homo sapiens
ttggaacacctggcgagtcctcggtgtcggtggccggcagtcatctcgcggccgttcagaattataaggctgtctgcagagatttgaaaaatggcaacaaatgaaagtgtcagcatctttagttcagcatccttggctgtggaatatgtagattcacttttacctgagaatcctctgcaagaaccatttaaaaatgcttggaactatatgttgaataattatacaaagttccagattgcaacatggggatcccttatagttcatgaagccctttatttcttattctgtttacctggatttttatttcaatttataccttatatgaaaaaatacaaaattcaaaaggataagccagagacatgggaaaaccaatggaagtgtttcaaagttcttctctttaatcacttctgtatccagctgcctttgatttgtggaacctattattttacagagtatttcaatattccttatgattgggaaagaatgccaagatggtattttcttttggcaagatgctttggttgtgcagtcattgaagatacttggcactattttctgcatagactcttacaccacaaaagaatatacaagtatattcataaagttcatcatgagtttcaggctccatttggaatggaagctgaatatgcacatcctttggagactctaattcttggaactggatttttcattggaatcgtgcttttgtgtgatcatgtaattcttctttgggcatgggtgaccattcgtttattagaaactattgatgtccatagtggttatgatattcctctcaaccctttaaatctgatccctttctatgctggttctcggcatcatgatttccaccacatgaacttcattggaaactatgcttcaacatttacatggtgggatcgaatttttggaacagactctcagtataatgcctataatgaaaagaggaagaagtttgagaaaaagactgaataaatatctcacgtaaaccttcctgaaagataaacgttttcctgaattcagaaactagtagctaacattgcttctggagagcagaaataagcatgtcttctggctactaagtgataaaaagaacattaacaacctttaattaccttcctagtgggaactttttctactttacctacaagttctatatatgtagaaatgaataaatatatatttaagtacagttttcatgaggaagttttaaaagaccatgttcctaagcttccaagaaggttttggatactagaagtattaatctatggcttttctcccagtaaaaccataggcctgaagttcacattgggtctttaaatcttttagatatatactggtcatttcagaaaattcttcatagtggtattggccttatatttaactttttttttattttttttttgagacaaagccacactctgtctccttgtctggagtgtggtggcacagtctcagctcactgcaacctctgcctcccagttcaagcaattcttctgcctcagcctcccaagtagctgggattacaggcacccgccaccacgcccagctaatttttgtatttttgtagagatggggtttctcgatgttggccaggctggtctcaaacttctgacctcaagtgatctgcccaccttggcctcccaaagtgctgggattacaggtgtaagccactgcgcccggcctttttaactttaaacatgttttagaattcacctaaagatcaaaatatcatggattgaac

SEQ ID NO: 708 - DNA, 60 bp, Homo sapiens
gaattcacctaaagatcaaaatatcatggattgaacctcatcaattgatagcagtgagtg

SEQ ID NO: 709 - DNA, 1874 bp, Homo sapiens
atgggaaacaagcagccccagaaggtcacggtgcctactgggacagccctccaaggagtggtattgatcgtctccacgctgcaccagccaggtggctggatatgtggcaaggatccctgctgcagcttgaggccactttcaaactctgtacagaacgccttggcctgcaagagtaaacaagattaccaggctggaattctgttcaagaccagggcttttatatccagagattgtgggtcagatgcggcagaagactctgcttccaagggagagacttatactttaaccttggagcataagccccagagctacagacctgctgagaagagggactgtcctacatcccttttaagggccgacccctgtcccggggtggctggggggcgggggagggggacctgcggccccgcggccaacccggttggtgcagacttggggatcccagaagggacagtgcccgcccagtcgcggcgattgagggtccctgtccgggcgcagctcgggccagccgcgtgctccggggccgcggcttctcccggaacccccgcgggcggggcctgccttccggagccgagccgtgtgggcagccgcgggctatataagccgcgagcctggccgccgcggggcagacggcgacagcagcggcggcgagcgcctcggagcgcggcggaacagcgccccccgagccccgtgccccccgacgggtccgcccgcccgcccgccctcccgaggagcgccggcccgggcccgcgagggccgccgccaccccgcagcagatttggatcccccgcccggcgagcccccggctgctgcctcccggggggccccggcgcagcggccgccctcggagagccccggcgccccgccgcccggccccgcagacgccggaggcgccatggccgccaagcccggcgagctgatgggcatctgctccagttaccaggcggtgatgccgcacttcgtgtgcctggccgacgagttcccgcagcccgtgcggcccgccaagctgcccaagggccggggccggctgcggcggccgcgccagtctcgcttcaagacgcagccggtgaccttcgacgagatccaggaggtggaggaggagggggtgtcccccatggaggaggagaaggccaagaagtcgttcctgcagagcctggagtgcctgcgccgcagcacgcagagcctgtcgctgcagcgggagcagctcagcagctgcaaactgaggaacagcctggactccagcgactccgactcggccctgtaaggggcgccgcccgcgggggggacgcgcgcgtccgcggtccgcgcggggaccggcgtgtgaaccccgagagtgcccgcgccctgctcccgggggacccgcaaggacccgggaccgccgctcctcgcgcgctcggactcccgccccgctgcgaaccggtcggtgcgcccctcgccgcgctcgccctggcccgggagcgccgggagcggggccgctttcctcgtccttgtaaatgtttattttttaactcttcccagtgcgaactctgctgtgagtgtgtgcggggaggcgcgcccgcgctgagtcggcggcgggtagccactccatgcccttgtccgatggtttgcaactccgattttgcacaccgctccaccgtgccccccagcgcacacccattcacactcacgccaacactctcgctgaacacttttataattgttaggcgtggccgttgggactttgggcgcagcgcggctgctactgcgtctggaggattgatatttatttttgcattgcgatggctgaaggcatttatttaacgatctttttacctggatatgtctgtgaggctcctgaaaggagacaaataaagtcaatatatttgcacagtgca

SEQ ID NO: 710 - DNA, 60 bp, Homo sapiens
acctggatatgtctgtgaggctcctgaaaggagacaaataaagtcaatatatttgcacaa

SEQ ID NO: 711 - DNA, 2280 bp, Homo sapiens
tctactcctctgattatttgaaatgctgaggaaaatgtccctcccatagtaaaacttgtaaataaggaactatatcatattcagtagctgtgttctgttccatctttttttttttttttgagatggagttttgcttgttgcccaggctggagtgcagcggcacgatcttggttcactgcaacctccgcctcccaggttcaagcgattctcttgcctcagcctcccgagtagctggggactacaggtgtgcgacaccatgcctggctaatttttttgtatttttagtagagatggggtttcaccatgttggccaggctggtctcaaactcctgacctcaaaggatccacccgccttggcctcccaaagtgctgggatcacaggcgtgagccaccatgcccggcccatctttttttttttttttttttttaaagatgttaataaactttatacctttctggagactttgttctaaaatgtacataaatgctcatctagttaacatatttacttagaatgtgggaggaggagtcacattattatccctgaatctcaagtacagcagaagtgaattcctgggatagtaggatagactaacatgtaaaaaggccaggtgatgcataggttctcatttcactgccctcagccttcctctccttctgagctgtgccttctcacatgttcagtcaactccagggaatattgtctccatcttctggatagaactagttgcaggatccgttacaagaattcagagttttggcatctcccctttgtatgttgtaggagaaggtttggcattgaaaatgtgctgttgttccaaagaaaaattagcaaaggacttgagatttagaaaagtctcctttgtaatgtgcatcattaccagttatctaaagaaaaacatgtaaaagccaacaaaacccttgaaaatattttgcatatggatgtctgtttcacgtttcaactgaagatgtatagagcacctctgatgatgaggaagataccatgctaggcagtactttcaagaacgtgagttcttatttctgcaggccttttgtgcccccttttaaatgttagcatttattaggtacaaactagtggggaaggtttttttaaaaagttttgcagtcttgtaatttacctttttaaaaaatttattttatttttctgagatggagtcttgctctgttgcccaggctggagtgcagtggtgccatctcagctaactgcaacttccacttcccaggttcaagcgattctcctgccttagcctcccaagtagctgggactacaggcgcatgccagcatgcctggctaatttttgtatttttagtagagcgggggttttgccatgttggccaggctggtcttgaactcctgacctcaggtgatccgcctgccctggcctcccaaagtgctgggattacaggcatgagccactgcgcccagccttgtaatttacctttgatggtgacctgaaatgcagtatgatcctatatgtggcacgtagtaatgttcagtgtttgctgaattaattctgggcagcactaagaaatccctctttcccagtcatattctataacacatttcccatttgccacaaaacctgcagctttttggtccaggtaatgacatttgctgccattttgatgatttaaaaatggtcgtgggagttgaacatagtcatgaattcaggattcctgagcatgtagacagtcatcccagtggaaagacacgttcacttaagagaagtttaagttagaggaaacagtttatgctaaaaaaatttttagaaaagtccttgagaatttttgatttagtcttgacctcatgaagctggtagttatgatgtgcatagtttgtatcaccgtttatgaagatggagaatctagtcagcacgtgttggtttattctaggaatttttagggaacacttctgttgctggcaccaggtgatgaatatggttaaaaaaagactcgtttctgcctaaacatagggaagaagagcaaattaaaaggagtaattaaaactgataaaagctcaagttacctttgtgatgatgaggcgggcagttaacgcgaaagggttgggaaaggcttcctggagggactagggggcggtctaagcacagggaacctaaccggggactccagtgtggcacagcggcaaggtatgtgctgggcaaaatgataggtgtcttgggagaccaggcaaagagagctggattaggagccgttaagtatatatttttcttctttttaaataaaataatgcactgggtg

SEQ ID NO: 712 - DNA, 60 bp, Homo sapiens
aagctggtagttatgatgtgcatagtttgtatcaccgtttatgaagatggagaatctagt

SEQ ID NO: 713 - DNA, 2561 bp, Homo sapiens
gggggactcgagagctagctgagcgaatgggccggcgactgtggagttagcgtcctcaatgtggacgccctgagctcccattaggagccgctggctgcggcagcaggggactagcgtgaaagttggctaaaaaaaagaaaagaacatggaggcagatataatcacaaatcttcgatgcaggctcaaagaggctgaagaagagcgactaaaagctgcacagtatggtttacaactagtagagagtcaaaatgaattacagaatcaattggataaatgtcgtaatgaaatgatgaccatgactgagagttatgaacaagaaaaatatacccttcaaagagaagttgaactcaagagtcgaatgttagaaagtttgagctgcgaatgtgaagctattaaacaacaacaaaaaatgcacctggagaaattggaagaacaactaagcagaagccatggacaggaagtgaatgaactaaaaactaagatagaaaaactgaaagtggaattagatgaagccaggcttagtgaaaagcagctgaagcaccaagtagatcatcagaaggaactcctctcttgtaaatcagaggaactgcgcgtaatgtctgaacgtgtgcaggaaagcatgtcttcagagatgctggctcttcaaattgagctgacagaaatggagagtatgaagaccaccctcaaagaagaagtgaatgaactacaatacagacaagaacagctagaacttcttattactaacctaatgcgccaggtagaccggcttaaagaggaaaaagaggagcgagagaaagaagcagtttcttactataatgccctagagaaagctcgtgtagcaaatcaagatcttcaggtacagttggaccaggcactccagcaagccttggatcccaatagtaaaggcaactctttgtttgcagaggtggaagatcgaagggcagcaatggaacgtcagcttatcagtatgaaagtcaagtatcagtcactaaagaagcaaaatgtatttaacagagaacagatgcagagaatgaagttacaaattgccacgttgctacagatgaaagggtctcaaactgaatttgagcagcaggaacggttgcttgccatgttggagcagaagaatggtgaaataaaacatcttttaggtgaaattagaaatctggagaaatttaagaatttatatgacagtatggaatctaagccttcagtcgactctggtactctggaagataacacctattatacagatttacttcagatgaagctggataacttaaacaaagaaattgaaagcactaaaggtgaattgtccatacagcgaatgaaagcattatttgagagccagcgggctctagatattgagcgaaaactttttgcaaatgaaagatgcctccagctttcagaaagtgaaaatatgaaactgagagctaaactagatgaattgaaactaaaatatgaacctgaagagacagttgaagtgcctgtactgaaaaagaggcgtgaggtgctccctgtggatataaccaccgctaaagatgcatgtgtcaacaacagtgctctcgggggagaagtttatcgattaccgcctcagaaagaggagacacagtcctgccctaacagtttagaagataacaacttgcaattagaaaaatcagtttctatacacacaccagtagtcagtctctctcctcacaaaaatctgcccgtggatatgcagctgaagaaggaaaagaaatgtgtgaaactcataggagttcccgctgacgctgaggccttaagtgaaagaagtggaaacacccctaactctcccaggttagctgctgaatcaaagcttcaaacagaagttaaagaaggaaaagaaacttcaagcaaattggaaaaagaaacttgtaagaaatcacaccctattctatatgtgtcttctaaatctactccagagacccagtgccctcaacagtaaagacttttctttaataagagtacggtgccacttgcctcaaaagttactatggtgcttaagattgtcttgatctgacatatatcaccttctgggttatttactcattgtgccaggacctggcattttcatgtgcctttgaccaagtgttcagaatttgcttgactctaacctggagagcttcttaagtgatgccccttcatggagcttctatgacagtgaataaactattaattgaaggaaaatgttataattaatgtatctatttgctgcattgtatatggattaaatgataaaaaacaagtaatctaccctcagagccatgtatttgagaatgcttcaatcatattttcctatgtacttttttttataaacttagttttagactatgttgtaaaaatgggaaggttgtaaactatgttgtaaaaataggaaatgtggcttaaaatatatacattatattgtttcaggattttgtcagtgtttaaagaaccaatgttcatctttgtatttatatacatgatttaaattttgtctaaaattttaaataaaactgcagtgatttatccgtaaaaaaaaaaaaaaaaaaaaaaaaaaaaaa

SEQ ID NO: 714 - DNA, 60 bp, Homo sapiens
gcctcaaaagttactatggtgcttaagattgtcttgatctgacatatatcaccttctggg

SEQ ID NO: 715 - DNA, 1667 bp, Homo sapiens
ttaatacttctatttcttacaaaacaaccgtataggggttaaagtatcagtgcaaagtcccgttcaaatattgactcagtaatgagctctacaagccagcctttgtggcatgttaaattcaaaacaagcttagcatttttttttttttttggatagaaactggtgggggtggggaaagaaagagggaactgggaagagaaggaggggaacttaaaccttgcttcctgctctgtctttctcagaaaaccaaatatggcatcttccatgaggagcttgttttctgaccacgggaaatatgttgaatctttccggaggtttctcaaccattccacggaacaccagtgcatgcaggaattcatggacaagaagctgccaggcataataggaaggattggagacacaaaatcagaaattaagattctaagcataggcggaggtgcaggtgaaattgatcttcaaattctctccaaagttcaggctcaatacccaggagtttgtatcaacaatgaagttgttgagccaagtgctgaacaaattgccaaatacaaagagcttgtagccaagacatcgaacctcgagaacgtaaagtttgcttggcataaggagacatcatctgaataccaaagtagaatgttggagaaaaaggagcttcaaaagtgggactttattcatatgattcaaatgctgtattatgtaaaagacatcccagctaccctgaaattcttccatagtctcttaggtaccaatgctaagatgctcattattgttgtgtcaggaagcagtggctgggacaagctgtggaaaaagtacggatcacgctttccccaggatgacctctgccagtatatcacatcagatgacctcactcagatgctggacaacctagggcttaagtatgagtgctatgaccttttgtccaccatggatatatctgactgctttattgatggtaatgaaaatggagacctgctttgggattttttgactgaaacctgcaactttaatgccacagcaccacctgatctcagagcagagcttgggaaagatctacaagagcctgaatttagtgctaagaaagaggggaaggttctttttaataatactctgagtttcatagtgattgaggcataactatcaatcacaaaagtatattcaaaaattatattttgaacaactcgaatcactcatttgtttccatattaaaatcacaaactcatccattaatgtagataaagcactgtttggatatgagatgtagcaaattccaatacattattggacttccatttggaatcatatgggatactgctggtcttatcctgtccctcctccaggtagagagaccacatgcaggctcaacataacataagctagaaaaattagatgactgaatttctatggcatattgataataaaattcattccatttgctgattgtctgaaattttctagaatactaataaaatacatactatagattctttattagtgaagtatgcactaatcaatactttgaacacaaagcctgtgttactgatttggccgttttgtgaagaaacatttatctttgtacgttcttctattgtgctttctatctaatttttattaatttgtaagagtaagcacctttagaatattaaaaattaattctttatcacatgttgtca

SEQ ID NO: 716 - DNA, 60 bp, Homo sapiens
tgagatgtagcaaattccaatacattattggacttccatttggaatcatatgggatactg

SEQ ID NO: 717 - DNA, 8257 bp, Homo sapiens
taaatttaaaggcggggcggcctgtgagccctgaagtgccggccgcggagggtcctggccattttggtgggaccagttcagcctgataggatggcggaggaaggagccgtggccgtctgcgtgcgagtgcggccgctgaacagcagagaagaatcacttggagaaactgcccaagtttactggaaaactgacaataatgtcatttatcaagttgatggaagtaaatccttcaattttgatcgtgtctttcatggtaatgaaactaccaaaaatgtgtatgaagaaatagcagcaccaatcatcgattctgccatacaaggctacaatggtactatatttgcctatggacagactgcttcaggaaaaacatataccatgatgggttcagaagatcatttgggagttatacccagggcaattcatgacattttccaaaaaattaagaagtttcctgatagggaatttctcttacgtgtatcttacatggaaatatacaatgaaaccattacagatttactctgtggcactcaaaaaatgaaacctttaattattcgagaagatgtcaataggaatgtgtatgttgctgatctcacagaagaagttgtatatacatcagaaatggctttgaaatggattacaaagggagaaaagagcaggcattatggagaaacaaaaatgaatcaaagaagcagtcgttctcataccatctttaggatgattttggaaagcagagagaagggtgaaccttctaattgtgaaggatctgttaaggtatcccatttgaatttggttgatcttgcaggcagtgaaagagctgctcaaacaggcgctgcaggtgtgcggctcaaggaaggctgtaatataaatcgaagcttatttattttgggacaagtgatcaagaaacttagtgatggacaagttggtggtttcataaattatcgagatagcaagttaacacgaattcttcagaattccttgggaggaaatccaaagacacgtattatctgcacaattactccagtatcttttgatgaaactcttactgctctccagtttgccagtactgctaaatatatgaagaatactccttatgttaatgaggtatcaactgatgaagctctcctgaaaaggtatagaaaagaaataatggatcttaaaaaacaattagaggaggtttctttagagacgcgggctcaggcaatggaaaaagaccaattggcccaacttttggaagaaaaagatttgcttcagaaagtacagaatgagaaaattgaaaacttaacacggatgctggtgacctcttcttccctcacgttgcaacaggaattaaaggctaaaagaaaacgaagagttacttggtgccttggcaaaattaacaaaatgaagaactcaaactatgcagatcaatttaatataccaacaaatataacaacaaaaacacataagctttctataaatttattacgagaaattgatgaatctgtctgttcagagtctgatgttttcagtaacactcttgatacattaagtgagatagaatggaatccagcaacaaagctactaaatcaggagaatatagaaagtgagttgaactcacttcgtgctgactatgataatctggtattagactatgaacaactacgaacagaaaaagaagaaatggaattgaaattaaaagaaaagaatgatttggatgaatttgaggctctagaaagaaaaactaaaaaagatcaagagatgcaactaattcatgaaatttcgaacttaaagaatttagttaagcatcgagaagtatataatcaagatcttgagaatgaactcagttcaaaagtagagctgcttagagaaaaggaagaccagattaagaagctacaggaatacatagactctcaaaagctagaaaatataaaaatggacttgtcatactcattggaaagcattgaagacccaaaacaaatgaagcagactctgtttgatgctgaaactgtagcccttgatgccaagagagaatcagcctttcttagaagtgaaaatctggagttgaaggagaaaatgaaagaacttgcaactacatacaagcaaatggaaaatgatattcagttatatcaaagccaattggaggcaaaaaagaaaatgcaagttgatctggagaaagaattacaatctgcttttaatgagataacaaaactcacctcccttatagatggcaaagttccaaaagatttgctctgtaatttggaattggaaggaaagattactgatcttcagaaagaactaaataaagaagttgaagaaaatgaagctttgcgggaagaagtcattttgctttcagaattgaaatctttaccttctgaagtagaaaggctgaggaaagagatacaagacaaatctgaagagctccatataataacatcagaaaaagataaattgttttctgaagtagttcataaggagagtagagttcaaggtttacttgaagaaattgggaaaacaaaagatgacctagcaactacacagtcgaattataaaagcactgatcaagaattccaaaatttcaaaacccttcatatggactttgagcaaaagtataagatggtccttgaggagaatgagagaatgaatcaggaaatagttaatctctctaaagaagcccaaaaatttgattcgagtttgggtgctttgaagaccgagctttcttacaagacccaagaacttcaggagaaaacacgtgaggttcaagaaagactaaatgagatggaacagctgaaggaacaattagaaaatagagattctccgctgcaaactgtagaaagggagaaaacactgattactgagaaactgcagcaaactttagaagaagtaaaaactttaactcaagaaaaagatgatctaaaacaactccaagaaagcttgcaaattgagagggaccaactcaaaagtgatattcacgatactgttaacatgaatatagatactcaagaacaattacgaaatgctcttgagtctctgaaacaacatcaagaaacaattaatacactaaaatcgaaaatttctgaggaagtttccaggaatttgcatatggaggaaaatacaggagaaactaaagatgaatttcagcaaaagatggttggcatagataaaaaacaggatttggaagctaaaaatacccaaacactaactgcagatgttaaggataatgagataattgagcaacaaaggaagatattttctttaatacaggagaaaaatgaactccaacaaatgttagagagtgttatagcagaaaaggaacaattgaagactgacctaaaggaaaatattgaaatgaccattgaaaaccaggaagaattaagacttcttggggatgaacttaaaaagcaacaagagatagttgcacaagaaaagaaccatgccataaagaaagaaggagagctttctaggacctgtgacagactggcagaagttgaagaaaaactaaaggaaaagagccagcaactccaagaaaaacagcaacaacttcttaatgtacaagaagagatgagtgagatgcagaaaaagattaatgaaatagagaatttaaagaatgaattaaagaacaaagaattgacattggaacatatggaaacagagaggcttgagttggctcagaaacttaatgaaaattatgaggaagtgaaatctataaccaaagaaagaaaagttctaaaggaattacagaagtcatttgaaacagagagagaccaccttagaggatatataagagaaattgaagctacaggcctacaaaccaaagaagaactaaaaattgctcatattcacctaaaagaacaccaagaaactattgatgaactaagaagaagcgtatctgagaagacagctcaaataataaatactcaggacttagaaaaatcccataccaaattacaagaagagatcccagtgcttcatgaggaacaagagttactgcctaatgtgaaaaaagtcagtgagactcaggaaacaatgaatgaactggagttattaacagaacagtccacaaccaaggactcaacaacactggcaagaatagaaatggaaaggctcaggttgaatgaaaaatttcaagaaagtcaggaagagataaaatctctaaccaaggaaagagacaaccttaaaacgataaaagaagcccttgaagttaaacatgaccagctgaaagaacatattagagaaactttggctaaaatccaggagtctcaaagcaaacaagaacagtccttaaatatgaaagaaaaagacaatgaaactaccaaaatcgtgagtgagatggagcaattcaaacccaaagattcagcactactaaggatagaaatagaaatgctcggattgtccaaaagacttcaagaaagtcatgatgaaatgaaatctgtagctaaggagaaagatgacctacagaggctgcaagaagttcttcaatctgaaagtgaccagctcaaagaaaacataaaagaaattgtagctaaacacctggaaactgaagaggaacttaaagttgctcattgttgcctgaaagaacaagaggaaactattaatgagttaagagtgaatctttcagagaaggaaactgaaatatcaaccattcaaaagcagttagaagcaatcaatgataaattacagaacaagatccaagagatttatgagaaagaggaacaacttaatataaaacaaattagtgaggttcaggaaaacgtgaatgaactgaaacaattcaaggagcatcgcaaagccaaggattcagcactacaaagtatagaaagtaagatgctcgagttgaccaacagacttcaagaaagtcaagaagaaatacaaattatgattaaggaaaaagaggaaatgaaaagagtacaggaggcccttcagatagagagagaccaactgaaagaaaacactaaagaaattgtagctaaaatgaaagaatctcaagaaaaagaatatcagtttcttaagatgacagctgtcaatgagactcaggagaaaatgtgtgaaatagaacacttgaaggagcaatttgagacccagaagttaaacctggaaaacatagaaacggagaatataaggttgactcagatactacatgaaaaccttgaagaaatgagatctgtaacaaaagaaagagatgaccttaggagtgtggaggagactctcaaagtagagagagaccagctcaaggaaaaccttagagaaactataactagagacctagaaaaacaagaggagctaaaaattgttcacatgcatctgaaggagcaccaagaaactattgataaactaagagggattgtttcagagaaaacaaatgaaatatcaaatatgcaaaaggacttagaacactcaaatgatgccttaaaagcacaggatctgaaaatacaagaggaactaagaattgctcacatgcatctgaaagagcagcaggaaactattgacaaactcagaggaattgtttctgagaagacagataaactatcaaatatgcaaaaagatttagaaaattcaaatgctaaattacaagaaaagattcaagaacttaaggcaaatgaacatcaacttattacgttaaaaaaagatgtcaatgagacacagaaaaaagtgtctgaaatggagcaactaaagaaacaaataaaagaccaaagcttaactctgagtaaattagaaatagagaatttaaatttggctcaagaacttcatgaaaaccttgaagaaatgaaatctgtaatgaaagaaagagataatctaagaagagtagaggagacactcaaactggagagagaccaactcaaggaaagcctgcaagaaaccaaagctagagatctggaaatacaacaggaactaaaaactgctcgtatgctatcaaaagaacacaaagaaactgttgataaacttagagaaaaaatttcagaaaagacaattcaaatttcagacattcaaaaggatttagataaatcaaaagatgaattacagaaaaagatccaagaacttcagaaaaaagaacttcaactgcttagagtgaaagaagatgtcaatatgagtcataaaaaaattaatgaaatggaacagttgaagaagcaatttgagccaaactatctatgcaagtgtgagatggataacttccagttgactaagaaacttcatgaaagccttgaagaaataagaattgtagctaaagaaagagatgagctaaggaggataaaagaatctctcaaaatggaaagggaccaattcatagcaaccttaagggaaatgatagctagagaccgacagaaccaccaagtaaaacctgaaaaaaggttactaagtgatggacaacagcaccttatggaaagcctgagagaaaagtgctctagaataaaagagcttttgaagagatactcagagatggatgatcattatgagtgcttgaatagattgtctcttgacttggagaaggaaattgaattccacagaatcatgaagaaactgaagtatgtgttaagctatgttacaaaaataaaagaagaacaacatgaatgcatcaataaatttgaaatggattttattgatgaagtggaaaagcaaaaggaattgctaattaaaatacagcaccttcaacaagattgtgatgtaccatccagagaattaagggatctcaaattgaaccagaatatggatctacatattgaggaaattctcaaagatttctcagaaagtgagttccctagcataaagactgaatttcaacaagtactaagtaataggaaagaaatgacacagtttttggaagagtggttaaatactcgttttgatatagaaaagcttaaaaatggcatccagaaagaaaatgataggatttgtcaagtgaataacttctttaataacagaataattgccataatgaatgaatcaacagagtttgaggaaagaagtgctaccatatccaaagagtgggaacaggacctgaaatcactgaaagagaaaaatgaaaaactatttaaaaactaccaaacattgaagacttccttggcatctggtgcccaggttaatcctaccacacaagacaataagaatcctcatgttacatcaagagctacacagttaaccacagagaaaattcgagagctggaaaattcactgcatgaagctaaagaaagtgctatgcataaggaaagcaagattataaagatgcagaaagaacttgaggtgactaatgacataatagcaaaacttcaagccaaagttcatgaatcaaataaatgccttgaaaaaacaaaagagacaattcaagtacttcaggacaaagttgctttaggagctaagccatataaagaagaaattgaagatctcaaaatgaagcttgtgaaaatagacctagagaaaatgaaaaatgccaaagaatttgaaaaggaaatcagtgctacaaaagccactgtagaatatcaaaaggaagttataaggctattgagagaaaatctcagaagaagtcaacaggcccaagatacctcagtgatatcagaacatactgatcctcagccttcaaataaacccttaacttgtggaggtggcagcggcattgtacaaaacacaaaagctcttattttgaaaagtgaacatataaggctagaaaaagaaatttctaagttaaagcagcaaaatgaacagctaataaaacaaaagaatgaattgttaagcaataatcagcatctttccaatgaggtcaaaacttggaaggaaagaacccttaaaagagaggctcacaaacaagtaacttgtgagaattctccaaagtctcctaaagtgactggaacagcttctaaaaagaaacaaattacaccctctcaatgcaaggaacggaatttacaagatcctgtgccaaaggaatcaccaaaatcttgtttttttgatagccgatcaaagtctttaccatcacctcatccagttcgctattttgataactcaagtttaggcctttgtccagaggtgcaaaatgcaggagcagagagtgtggattctcagccaggtccttggcacgcctcctcaggcaaggatgtgcctgagtgcaaaactcagtagactcctctttgtcacttctctggagatccagcattccttatttggaaatgactttgtttatgtgtctatccctggtaatgatgttgtagtgcagcttaatttcaattcagtctttactttgccactagagttgaaagataagggaacaggaaatgaatgcattgtggtaatttag

SEQ ID NO: 718 - DNA, 60 bp, Homo sapiens
tgtagtgcagcttaatttcaattcagtctttactttgccactagagttgaaagataaggg

SEQ ID NO: 719 - DNA, 3448 bp, Homo sapiens
gttcagcgccggcgccggtgtgcgagccgcggcagagtgaggcaggcaacccgaggtgcggagcgacctgcggaggctgagccccgctttctcccagggtttcttatcagccagccgccgctgtccccgggggagtaggaggctcctgacaggccgcggctgtctgtgtgtccttctgagtgtcagaggaacggccagaccccgcgggccggagcagaacgcggccagggcagaaagcggcggcaggagaagcaggcagggggccggaggacgcagaccgagacccgaggcggaggcggaccgcgagccggccatgtcggtggtggggttggacgtgggctcgcagagctgctacatcgcggtagcccgggccgggggcatcgagaccatcgccaatgagttcagcgaccggtgcaccccgtcagtcatatcatttggatcaaaaaatagaacaatcggagttgcagccaaaaatcagcaaatcactcatgcaaacaatacggtgtctaacttcaaaagatttcatggccgagcattcaacgaccccttcattcaaaaggagaaggaaaacttgagttacgatttggttccattgaaaaatggtggagttggaataaaggtaatgtacatgggtgaagaacatctatttagtgtggagcagataacagccatgttgttgactaagctgaaggaaactgctgaaaacagcctcaagaaaccagtaacagattgtgttatttcagtcccctccttctttacagatgctgagaggcgatctgtgttagatgctgcacagattgttggcctaaactgtttaagacttatgaatgacatgacagctgttgctttgaattacggaatttataagcaggatctcccaagcctggatgagaaacctcggatagtggtttttgttgatatgggacattcagcttttcaagtgtctgcttgtgcttttaacaagggaaaattgaaggtactgggaacagcttttgatcctttcttaggaggaaaaaacttcgatgaaaagttagtggaacatttctgtgcagaatttaaaactaagtacaagttggatgcaaaatccaaaatacgagcactcctacgtctgtatcaggaatgtgaaaaactgaaaaagctaatgagctctaacagcacagaccttccactgaatatcgaatgctttatgaatgataaagatgtttccggaaagatgaacaggtcacaatttgaagaactctgtgctgaacttctgcaaaagatagaagtacccctttattcactgttggaacaaactcatctcaaagtagaagatgtgagtgcagttgagattgttggaggcgctacacgaattccagctgtgaaggaaagaattgccaaattctttggaaaagatattagcacaacactcaatgcagatgaagcagtagccagaggatgtgcattacagtgtgcaatactttccccggcatttaaagttagagaattttccgtcacagatgcagttccttttccaatatctctgatctggaaccatgattcagaagatactgaaggtgttcatgaagtctttagtcgaaaccatgctgctcctttctccaaagttctcacctttctgagaagggggccttttgagctagaagctttctattctgatccccaaggagttccatatccagaagcaaaaataggccgctttgtagttcagaatgtttctgcacagaaagatggagaaaaatctagagtaaaagtcaaagtgcgagtcaacacccatggcattttcaccatctctacggcatctatggtggagaaagtcccaactgaggagaatgaaatgtcttctgaagctgacatggagtgtctgaatcagagaccaccagaaaacccagacactgatgcaaatgaaaaaaaagttgaccagcctccagaagctaaaaagcccaaaataaaggtggtgaatgttgagctgcctattgaagccaacttggtctggcagttagggaaagaccttcttaacatgtatattgagacagagggtaagatgataatgcaagataaattggaaaaagaaaggaatgatgctaaaaatgcagttgaggaatatgtgtatgagttcagagacaagctgtgtggaccatatgaaaaatttatatgtgagcaggatcatcaaaattttttgagactcctcacagaaactgaagactggctgtatgaagaaggagaggaccaagctaaacaagcatatgttgacaagttggaagaattaatgaaaattggcactccagttaaagttcggtttcaggaagctgaagaacggccaaaaatgtttgaagaactaggacagaggctgcagcattatgccaagatagcagctgacttcagaaataaggatgagaaatacaaccatattgatgagtctgaaatgaaaaaagtggagaagtctgttaatgaagtgatggaatggatgaataatgtcatgaatgctcaggctaaaaagagtcttgatcaggatccagttgtacgtgctcaggaaattaaaacaaaaatcaaggaattgaacaacacatgtgaacccgttgtaacacaaccgaaaccaaaaattgaatcacccaaactggaaagaactccaaatggcccaaatattgataaaaaggaagaagatttagaagacaaaaacaattttggtgctgaacctccacatcagaatggtgaatgttaccctaatgagaaaaattctgttaatatggacttggactagataaccttaaattggcctattccttcaattaataaaatatttttgccatagtatgtgactctacataacatactgaaactatttatattttcttttttaaggatatttagaaattttgtgtattatatggaaaaagaaaaaaagcttaagtctgtagtctttatgatcctaaaagggaaaattgccttggtaactttcagattcctgtggaattgtgaattcatactaagctttctgtgcagtctcaccatttgcatcactgaggatgaaactgacttttgtcttttggagaaaaaaaactgtactgttgttcaagagggctgtgattaaaatctttaagcatttgttcctgccaaggtagttttcttgcattttgctctccattcagcatgtgtgtgggtgtggatgtttataaacaagactaagtctgacttcataagggctttctaaaaccatttctgtccaagagaaaatgactttttgctttgatattaaaaattcaatgagtaaaacaaaagctagtcaaatgtgttagcagcatgcagaacaaaaactttaaactttctctctcactatacagtatattgtcaatgtgaaagtgtggaatggaagaaatgtcgatcctgttgtaactgattgtgaacacttttatgagctttaaaataaagttcatcttatggtgtcatttct

SEQ ID NO: 720 - DNA, 60 bp, Homo sapiens
gtggaatggaagaaatgtcgatcctgttgtaactgattgtgaacacttttatgagcttta

SEQ ID NO: 721 - DNA, 5792 bp, Homo sapiens
aaagttcatccccccagaatgaaaatgaggacatttgagaaggtgatttaaggtgtggacatttgagaaggtgtcctatcaaattagtaaaccaaaggaaaagtactgaatagattaatccaaaacacttactgttttttaaacgaagaggatttcaccttgacagaaaaacaacttttattcaatatgtatttcctgaaattaaagagacaagtacagactgaaaggaaaatagattcgtaaataagctacgtcaactctatcctgctgaggatagctcagtgatgttaaatcctttacaaatccctggttgtcttcctacagacaagactgctttttgatgggactgatattaagagaaataggacctttggggcattcaactccttgataaaacttaaaagtatcggcatgagtggcttaacagaggaaataaagaagttttcaactaaatccaaaagtgcggtcattttctttactgctgttattttaaaaacctcttcataaccattgaaaaagaatcgacaactattttaaaagattaaagaaaggcagatgtctgcaaataattcccctccatcagcccagaagtctgtattacccacagctattcctgctgtgcttccagctgcttctccgtgttcaagtcctaagacgggactctctgcccgactctctaatggaagcttcagtgcaccatcactcaccaactccagaggctcagtgcatacagtttcatttctactgcaaattggcctcacacgggagagtgttaccattgaagcccaggaactgtctttatctgctgtcaaggatcttgtgtgctccatagtttatcaaaagtttccagagtgtggattctttggcatgtatgacaaaattcttctctttcgccatgacatgaactcagaaaacattttgcagctgattacctcagcagatgaaatacatgaaggagacctagtggaagtggttctttcagctttagccacagtagaagacttccagattcgtccacatactctctatgtacattcttacaaagctcctactttctgtgattactgtggtgagatgctgtggggattggtacgtcaaggactgaaatgtgaaggctgtggattaaattaccataaacgatgtgccttcaagattccaaataactgtagtggagtaagaaagagacgtctgtcaaatgtatctttaccaggacccggcctctcagttccaagacccctacagcctgaatatgtagcccttcccagtgaagagtcacatgtccaccaggaaccaagtaagagaattccttcttggagtggtcgcccaatctggatggaaaagatggtaatgtgcagagtgaaagttccacacacatttgctgttcactcttacacccgtcccacgatatgtcagtactgcaagcggttactgaaaggcctctttcgccaaggaatgcagtgtaaagattgcaaattcaactgccataaacgctgtgcatcaaaagtaccaagagactgccttggagaggttactttcaatggagaaccttccagtctgggaacagatacagatataccaatggatattgacaataatgacataaatagtgatagtagtcggggtttggatgacacagaagagccatcacccccagaagataagatgttcttcttggatccatctgatctcgatgtggaaagagatgaagaagccgttaaaacaatcagtccatcaacaagcaataatattccgctaatgagggttgtacaatccatcaagcacacaaagaggaagagcagcacaatggtgaaggaagggtggatggtccattacaccagcagggataacctgagaaagaggcattattggagacttgacagcaaatgtctaacattatttcagaatgaatctggatcaaagtattataaggaaattccactttcagaaattctccgcatatcttcaccacgagatttcacaaacatttcacaaggcagcaatccacactgttttgaaatcattactgatactatggtatacttcgttggtgagaacaatggggacagctctcataatcctgttcttgctgccactggagttggacttgatgtagcacagagctgggaaaaagcaattcgccaagccctcatgcctgttactcctcaagcaagtgtttgcacttctccagggcaagggaaagatcacaaagatttgtctacaagtatctctgtatctaattgtcagattcaggagaatgtggatatcagtactgtttaccagatctttgcagatgaggtgcttggttcaggccagtttggcatcgtttatggaggaaaacatagaaagactgggagggatgtggctattaaagtaattgataagatgagattccccacaaaacaagaaagtcaactccgtaatgaagtggctattttacagaatttgcaccatcctgggattgtaaacctggaatgtatgtttgaaaccccagaacgagtctttgtagtaatggaaaagctgcatggagatatgttggaaatgattctatccagtgagaaaagtcggcttccagaacgaattactaaattcatggtcacacagatacttgttgctttgaggaatctgcattttaagaatattgtgcactgtgatttaaagccagaaaatgtgctgcttgcatcagcagagccatttcctcaggtgaagctgtgtgactttggatttgcacgcatcattggtgaaaagtcattcaggagatctgtggtaggaactccagcatacttagcccctgaagttctccggagcaaaggttacaaccgttccctagatatgtggtcagtgggagttatcatctatgtgagcctcagtggcacatttccttttaatgaggatgaagatataaatgaccaaatccaaaatgctgcatttatgtacccaccaaatccatggagagaaatttctggtgaagcaattgatctgataaacaatctgcttcaagtgaagatgagaaaacgttacagtgttgacaaatctcttagtcatccctggctacaggactatcagacttggcttgaccttagagaatttgaaactcgcattggagaacgttacattacacatgaaagtgatgatgctcgctgggaaatacatgcatacacacataaccttgtatacccaaagcacttcattatggctcctaatccagatgatatggaagaagatccttaatcactgagctaacctaaataaggaaggatttcattttatggactgatattttgctgtgtaacttgttcttcgtagattgtcatctgcagtgctgcaaagatatgaagaaatatgataacgaataagtgacaccagtactgtagttcataatgagtaggtacaggcgggaaactgaataataagaagtcataatggaatcaaggtgaagctttttataaacttttttagcctaagcaataactggttttgtattttttcttaatccttcactttaatacaataggctcacttaatttgtcttcccatttctctttatatatatatatatatataaaaaaatataaatatatgtttgtttgtttgtttttttaaggaaaaacaagtcaagctagcatccagttactatatagcttggctaaattatacaagacttacaagattgattactcgacaggcttgtatttaagagataactgtgaggttaccattatgtgatgttactataaggacttttaacattggtttaacaaaccatagaggcattgaagggtttttcttagatgcctagaaaaagcacactgggctgttttacctttcttttttaggtcaatcaagactccaaaatagtgattcctaacctttttggagttgctctgctactctgaatatgttctatacagcataaggattgtcaccttctgtgtgttgcaacagcttctaagataattagggacaaatgatgttacaaaaggaagagtactgctggtctaagtgctgagttgtatgtctttgcatagctccactctgctgctaaatatgcatgttctgactgacaccatcttgatgccagtactggattccagcattcagcaggtgcagatctcggctttacacaatttatctttacctagggttcagtcagtaatttctgctttttagccagggccagtgcagggtcagttaatgctacagttactgtatagcaaacagtatccttttttctccttcccctagcctattgggctttgcagatatctggagtgttttaaagtcaattattttaagcagtttgaggggatgtgtaggagtggagcatgaaacagtttataaggctggggctgtattatcagcacagcaaattaaagaatgaaagaagtacttctttttacatttcagctccagcagccagctatttaaaaaatatttttaaatatcttccccaaagtttaagatgtgggaccatctacttgtaagaaacagtggcttatttcttcatttctcagtaatcattgtaaacctttttttttttcttctccactctaacaaaagtaaaagaacaaaacttttgctgaggtcttggactccactacttgttagttatgttggcctggacagatggcaggtctgtcggcagttcctcagtctgtaaaatgaagattatcattcttgcctctccctttgtcacagtgttgtcgtgaagatcagatatgtatgaatgcagtcaaataaactaaaaactaggaaagtgttaactatcgttgcccaccgaatttgaggtagcaaaaaaaaaaaagaatgttctggtacatgaacagactgagaaggcctttcgacatccctgaagctagtctcctgtctagactaaaaatatccttgaaagaatagtagcaaacagtatgcagtactcctgtgttctaagttcttttatgttttagtttaccctcacagcagccatagtgttaagtcattatgagcttcatcttaaagataagaaaactgaggcaaggggagattaacttactgccaaatttcaaacagttagtagtatttgagaccagtagtatggctctaatcttacccttagccctcccaaccattatgctgtactatctacccataaatacctccaggaaacattcccctcttggtaatttgtccttctatagaagcttcaaagattaaatcaaattaattttcaaaaaaaatttttttttagaaatgttattttccctgtgatagaggatgacttcccagtttcaccaaagtctgtttatatcaacacacacaaaatggaataattctgagtcactaggcaatcaatctactgtggttttactatgtaaggtgaaaattaactggaacgatgtttgtttgctatacttacatagtcaaactttacaagccatgaaattaattgcactctttgtatttgttgttaaatgcctaagaagttttctaaaaattttgtaaaggcactgtcagagaatctggagttgaatgattattccagatactgtataacctgcataactttttgtctttaagtcgtgtttgtaaaagaagtaattgctagaaacatttgataatgtacaaagtagtctataatgactgttcagtacatttttaatatttttttggttatatccaactttttgtaaatatactggaagcttgataataaaatgtatttcctatcaccatacttttccatgtgaaaacctgagcctatttctagtataagtatccaaagaaaagttttacctggttgtgttattttaccagac

SEQ ID NO: 722 - DNA, 60 bp, Homo sapiens
ctgagtcactaggcaatcaatctactgtggttttactatgtaaggtgaaaattaactgga

SEQ ID NO: 723 - DNA, 3088 bp, Homo sapiens
cgcgccagggaggttgtcgggaggggccggcgaataaaacgagcggcgaaagaaccgaaaaaaggctcgacgctaccgtgtatgaggaactttgatccttgcgggccaccattccggaagtagaatttagaggaagaaaataccggagttgcagggtataggtaaatttctcaaggttataggttggggttcttagaactttttgtggtgtgtgttggcctagagcgactcagaagcgttagtgacttcacctaaaaaagctaacctctctgctgagcgcgaccggtatgcggcgcaggatgagcctcagggcttctgttaagagtctgtctgagaaagccggtctgcgctgttcctcggtggcgaccttaattatgagatgagctaatgctttactgacttaaccatggcgcagcgggcagtgtggctcataagccacgaaccgggaactccactttgtggcaccgtgagattctccagacggtatccaactgttgaaaaacgagccagagtcttcaatggagcaagttatgtgcctgttcctgaagatggtccctttcttaaagcactgctctttgaacttagattattggatgatgataaagacttcgttgagagtcgtgatagctgttcacgcatcaataaaacatccatttatggactcctgataggaggtgaagaactctggccagttgttgcttttctgaagaatgacatgatatatgcttgtgttccactagttgaacaaactctgtcccctcgtccgccactaattagtgtcagtggagtttcacaaggctttgaatttctttttgggatacaggattttctttattcaggtcaaaaaaatgactctgagctgaatacaaaattgagccagttgcctgacttgcttctgcaggcttgtccatttggtactttattagatgccaacttacagaattcattagataataccaattttgcatctgtgactcagccacagaaacagccagcttggaaaactgggacgtacaaaggaaaaccacaagtttctatttctatcactgaaaaggtaaaatccatgcaatatgataaacagggtatagcagatacatggcaagttgttggaacagtgacttgcaagtgtgatttggaaggaatcatgccaaatgttaccatcagcttgagtctccccaccaatggatctccacttcaggatattctagttcacccttgtgtaacttctcttgactctgcaattctgacttctagtagtattgatgcaatggatgactctgcatttagtgggccttacaaatttccattcactccacctttagagtcattcaacttatgcttctacacttcccaggtccctgccccaccaattttgggtttttatcaaatgaaggaggaagaagtacaactaagaataaccattaatttaaaacttcatgaaagtgtgaaaaataattttgaattctgtgaagcccatatacctttttacaatagaggtccaattacacatttggaatacaaaactagttttggccagcttgaagtatttcgagagaaaagcttattgatctggattattggccagaagttcccaaaatcaatggaaattagtctttctggaactgtaacttttggagccaagagccatgagaagcagccatttgacccaatttgtactggagaaacagcatatttaaagcttcattttaggatcttagattacacacttactggatgttatgcagatcagcattcagttcaagtttttgcatcaggaaaaccaaaaataagtgcacaccggaaactaatttcttctgattattacatctggaattctaaagcccctgctccagtaacatatggatcattattattgtaatagtctcatgtttaaatgggattatataatgataacagtttaaagaaaatcataatcttatatttttaatgtggatgcatataacctgtgagtgaaaaatcactgaatgatttaattgtaaaagtagtcttatgtggtgtttgtagtctgatagagcttgaaaggacattttaaaagctaatgtctccaattttgtcaaccttcgattttatgccagtataattcagaacatagaaaagtaatgattcacttgggctcattttagactggtcctgggtcaccctgccacacttgtttcctagtgtttctgtggcagacattgctaatcaattacagcccttttctgtactgagccttggataaagggtcaggctcctttttagttcagagattcaggcagccactcccagtgggttgtagataatgtgcaagataaaaactattttctcttccaaatctaagtactaagctcctagtataaggtgttgttacagaataccagagaccatgttagagacaactacatctcttcaaaaaacagccaacagagacaaaggaaaagtgtttaaatagtaagctgttcttcttaatcagaactatcctattgactaataaataatctgcataattctacttaaggtgtgtaatctctgttctagagttagtttttaagtaagcttgttaatctgccactttgacattttgcttaggatgtcagtagccatattaagatgtgtagaataccttcagaagatgatcatagtgttttgtaatcatttaatgtctgcagccaaatttttaaaggtaatttagacctaatactgctcttgctgtgtcttattaagttaaaattaatgaatgaattctggtaaaaattcaaaaggcactctgtgagtagagagtatcatttaagcttattttagtcacatgtagtatatatctccttaaagctgtcactctcactttcttaccattctcttgatttcttcagaaaccatctagtcatcatctttatactctacctgcttctgcaattatatatcatattatgttttcagagcagttcattgtcaagttggactttaagtgaccattcaagaaaagatgaaatctcacgaacctcaaaacttcattcatgtctttttacaaatgagaaaaaaaaatgcattaaagattaatactcaatttgaaaaaaaaaaaaaaaaaaaa

SEQ ID NO: 724 - DNA, 60 bp, Homo sapiens
ctttaagtgaccattcaagaaaagatgaaatctcacgaacctcaaaacttcattcatgtc

SEQ ID NO: 725 - DNA, 1872 bp, Homo sapiens
ttcagaaaaaaagtgattcaatttccataaatttaatttactcacagcgttttcataatgttgctataacatctgaatgacagtccatggcatattcctggttgcagcaagcactctcctactccctgtccatattagatgcatctcctgttttcaagggagagaaacccctgctcagcccctgatgagcacatcatcaaatatttactattgttttattaatcaatgtgggtggttattatgtgtctctggctcagggagtgtttcatccaactaagctccctcagtggttgtctcacttcatctcttatagattaacttccttccaaaatgtcaccattcctgtacctggttctcttggtacttgggcttcatgctacaatccactgtgcatcacctgaaggcaaagtaacagcctgccattcatcccaaccaaatgccactctctacaagatgtcatccattaatgctgactttgcattcaatctgtaccggaggttcactgtggagaccccagataagaacatcttcttttcccctgtgagcatttctgcagctttggttatgctttcctttggggcctgctgcagcacccaaactgagattgtggagaccttggggttcaacctcacagacactccaatggtagagatccagcatggcttccagcatctgatctgttcactgaattttccaaagaaggaactggaattgcagataggaaatgccctcttcattggcaagcatctgaaaccactggcaaagttcttgaatgatgtcaagaccctctatgagactgaagtcttttctaccgacttctccaacatttctgcagccaagcaggagattaacagtcatgtggagatgcaaaccaaagggaaagttgtgggtctaattcaagacctcaagccaaacaccactatggtcttagtgaactatattcactttaaagcccagtgggcaaatccttttgatccatccaagacagaagacagttccagcttcttaatagacaagaccaccactgttcaagtgcccatgatgcaccagatggaacaatactatcacctagtggatatggaattgaactgcacagttctgcaaatggactacagcaagaatgctctggcactctttgttcttcccaaggagggacagatggagtcagtggaagctgccatgtcatctaaaacactgaagaagtggaaccgcttactacagaagggatgggttgacttgtttgttccaaagttttccatttctgccacatatgaccttggagccacacttttgaagatgggcattcagcatgcctattctgaaaatgctgatttttctggactcacagaggacaatggtctgaaactttccaatgctgcccataaggctgtgctgcacattggtgaaaagggaactgaagctgcagctgtccctgaagttgaactttcggatcagcctgaaaacactttcctacaccctattatccaaattgatagatctttcatgttgttgattttggagagaagcacaaggagtattctctttctagggaaagttgtgaacccaacggaagcgtagttgggaaaaaggccattggctaattgcacgtgtgtattgcaatgggaaataaataaataatatagcctggtgtgattgatgtgagcttggacttgcattcccttatgatgggatgaagattgaaccctggctgaactttgttggctgtggaagaggccaatcctatggcagagcattcagaatgtcaatgagtaattcattattatccaaagcataggaaggctctatgtttgtatatttctctttgtcagaatacccctcaactcatttgctctaataaatttgactgggttg

SEQ ID NO: 726 - DNA, 60 bp, Homo sapiens
ggccattggctaattgcacgtgtgtattgcaatgggaaataaataaataatatagcctgg

SEQ ID NO: 727 - DNA, 2867 bp, Homo sapiens
ttcacatgatcaaggaagtttatggatgcgtttgtggaaatcttactctatgaacttgttggattagatgctgttttattctctactaagtgaaaagtgctttatttcagtgctttcccatggttgggagagagtagctgttaactattctgggtaatgggggtgagtatgttgaggaagagatttagaaccagaagagtgaagagactcaaactgttccataacaaggaaagctttaaagaccttgtatttcacagtctggagaactagagggatctgactcttggtcagttcatgtaacaaattatttattgagtacttgctgggctctcaagattcatgctttgagcacaggcagtcattcagtttccagtccacctgattacatcagcatgcacttagttttctttcttgttcacaaggacttttgatcatgcaagacctggccaagtcttctataatccagatgggtttcctggggctgttacttgagtattcctgtcaaaatattttcgtgaaccctgcctctcttagcaaacactacttcataagtgttaacaaacatccttttaataatctattccagaatattctccaggagtaagtttactggttgggatttgtggaagccattttctcatgtttcccaaataagatatgtagtcttcagctgattcctcaaagatgattgacagggagtttcacccatctttgtggtagtttgtgagttcctaggcatgtaagtgattaaaagattgagtacctgctctcctaatatctacccacttttaccatgtcagtgttttatgaattagatcacttaccaagagaaagcagaaacgaaatacttgaatctgacaatatccgactggcccttttcattgctctggatttattttccacatcaatctctttggggtggccctagcctattattcctgtgggttcagctgaggcatggttagcctgggtttataattcagtttacgttaaacattccctgtgcagcaacagctgttcatttaggtactctttttttttttctccttattacagttacttttggtattatgtgctttatctttaaaagctttctagctctaggaaattgttttccctgtttgtgtctattttattgcatcttgtgtaacactgtggttatatctataccaacaactttttgttgctatggataccacagattgtcctgaattaaaaccctaacataataaatgtctgtttagccgttactttactgagtaataatactatattgtggcagtatggccctttaatactaaggaggtatggtgtagaaattatttgaacactcatatccaaatgttattaatgatgtttgacagttttctcaatgcttaatgatattcctcactcctcattccagggtagaggagggtttggtcccaggctatggacaaactgctaatttgtttgaagtttgaattatttttcatgggaaagggaagtgataggaaatgaccaagaccatccacttttgacttgagtatggatcgagtataagtaatagtttcctagcctcactgattgtaccatgaactgacagacctaccagtcaaattcatgtacccagataatggtctctcacatggcaacaaagtacacagcagtttgcagtatgtgtctcttttaaagccagttcagtgttttcaccttgacgaccactcctgcaaacagttctcatagagctcttctctgctccccaaatcaatatattttgaagctatgtcaaatatttacatagaaaggaaataaagttgtatgtgctttgaaaccagcaaaatcctttgtacaacacctctcttctccttctatgtttatgaatagagttcgtggaatattgccatagtgcaaataatgacttccgtgtatcacttataccctgtaggggtgagctttcaccttaggtgtggttatatcctagcagtgtatcaagcccactcaaataatggtctatatttaaaagtatgtgtctagtttacttatttatgtcatttaacatccataaatgtacatctctcagttgtatatcatgattgtaaatcagaaattttgatggcaaaaatattctaaaacaacattcttcaggggaaagaaaaacatggataccttatctagcattgctcataaaagtactcatgttcatcctttttggaaactattaatcatgctagccttagatcattttaagctcctttgctcaaaccaatcattgatgtgcagtatgaccagcagctagtaagtctgtggtgctaccagtatagcttggaagatggttctgaattaatacctcagaatgatatcaaaagtaaaagagtggttctattgctaaatatattgactagctttcttataacaattttactttgaaattcaaagttccaaagctaaatgtctaaaagaagtaactgcagcttgttctgctgattttggaaaatagtattaaccatgtaagatctttggggttggagtgaaggtcttatctgcattaattttgttaatgcacattgtagatgtggagaacatcttgacctgcataaggattgcgtctcattttattgtgtagtgctttttcgaaatatttacatttctttggttcccatgttcatgtattctggagaagtaaaatttcttgattactgggcagaccctaaaactactaagagaaacataacatgtagttagctgtctgctcatggtttgttcaaatctaagctaaccttaatggtgctgtgtccgctgtccacagaaaacgcccttaagtagccctaccttactccttagagcttattttgcttttgtatttaataaaagctgtcttaaatgtt

SEQ ID NO: 728 - DNA, 60 bp, Homo sapiens
ggagtgaaggtcttatctgcattaattttgttaatgcacattgtagatgtggagaacatc

SEQ ID NO: 729 - DNA, 614 bp, Homo sapiens
tctaatacgactcactatagggaaagctggtacgcctgcaggtaccggtccggaattcccgggtcgacccacgcgtccgatctatccttataatatatgcaaagtagaaatggtatacagtagcttttaagcagctactccattgaaacctctcacccattaaggctgtttcttcaaagtggcatctcttattttaccgaaacaaacttagaaaacttcatgtactctggagttcacaggtgttttccttttgcatgttgccttctcctttcctcctatcacaaagaatgcttctattatcactcccagtcacttaaatgccattctgcttctttagcaggaaaaaatacctgaatgaattctcttacagaaagacagtttgactgaatttgctttttacaatcagtgtggaaaatatcatagtcaattgaggcaatcagtagaaatctctactaaaagtacaaaaaaaaaattagctgggcatgatggcgtgtgcctataatcccacctactcgggaggctgaggcaggagaatcgcttgaacctgggaggcggaagttgcagtgagccgagatggcgccactgtagtccagtctgggcgacagagtgagatt

SEQ ID NO: 730 - DNA, 60 bp, Homo sapiens
tgtaagaaaagagacatggccatttctaaactatataaggtgagtgtgtctattcccagc

SEQ ID NO: 731 - DNA, 3846 bp, Homo sapiens
cacataaatgcatttcttaaagtatttaaaaacaacacacaaaaaataagcacattctaaatctaatagaactaaaaattatgaaaagtgtttaatacatagtctttaaaatagtaatcttcttttaaatatatctttttttattggttagcttttctataggagaaaaccaaaaggactaagtggtgccttgcaggaagtaggaatagaattctcaggacgagaacattctggttagtatacattaaaaattatgtaagccatttgacttttaaaaaatacttcatatgaatttcattttttggtaatgtcattagtaagggatatcttcagcctaaaaaaaaaaaactcctaatctaaacaattcacattgtttctaagactttcaaattaccactttcataaactattgtaagataaactgccatctagtggctttctagttgctaagaagaatgaaaagaatgagccaaatcaaatggagattaaacaagtgctcaaataatagaatggactagtgaaaaaactgaacaagactattagattattcacaaatcctggttcctgcagaacgctggccacattttggggaactgtctaatacattttcatatcctcctctataaatgtggacgagcttgtctttcactggtaatgctgccatagccttccacttccaagaccagtttatcatgattaaaattagtagatggtcataaaactaaaactgtgttccaatttctacacaagtggtgtttttctttttaagttatttctttagcactaaggaaatagtactagtaccactaaattcagtgtttgatatctgtatcctcagggttggacgattctcggaatactgcccttcttgcttggaaaatgatcagagatggttgtgtaatgaaaattacaaggtcgttgaacaaggttagtagtgtcttgcctttttattctgtcatctcaaacttcataaacagtcatacgttctttgaaacgtagatttaatgtgtgcagtcatttataaatcaatgacatttctcttttttgtcataaaactgtatactgaagaaattaacgaatgcacagtttctaaagctgttgcatttgtctgtggaatcataggttcccactaagaagaatttcagcattctggccagaaatttgaatacaattcaagttgaagaaatgtctgcctgtaacattagcatccagggtcccagcatatataataaggagcctaaaaatataataaatcctcatgaaaaagttcaaatgaagtcaatttgtgcaaattctcctataaaggcacaacaggatcaattacaagtaaaaaacaatataaaagcaagtcttcacaatgtcaaaagttccttacctctttttaatactaagtcctctacttctgtggggcagttgcagtctcctaccttgaattcacctatctgtatgcaaaagcaaggaaaaaatgaacatcttgcatttaataccaaatctaaggcttcaacagttggttcagaattggtacttgtttctaccaccgttccaactgttcatcatgtttctgatttggaaatgagctctactctggactgtttacctgtgttggctgattgggaggatgtggttttactgccagcatctcagcctgaggaaaacgtagactgtacagttcccattagtgactcagacttagagatttcatttaattctggagaaagattaatggttttgaaagaattggaaatgtcaagtcatgaaaactttggagacatagaggaaactcctcaaaaatctgagacttctaagtctattgtgtacaagagtcctcacactactatttataatgtaaaagaagccaaagatccaggttcagatatttctgcctttaagttacctgaacacaaatcaagtaccttcaacagagttaatgccaatatgtctcatcctttagttttggggaaacatcctcttctttcaggtggtaccaaaaggaatccatgcagtccccaagctttcccaccagcaaaaaaacaacccttcactattcatgaagaaaagcctacatcatctgattgctccccagtaagaagttcttcctggaggcgtctcccatctatattaacttctacagttaacctacaagagccatggaagagtgggaaaatgacacctccattatgcaagtgtggtcggagatctaagagacttgttgtttctaataatggaccgaaccatggaaaagtcttctattgttgccctatcgggaaataccaagaaaacagaaaatgttgtggttatttcaaatgggaacaaacacttcaaaaggaaagagccaacagcatggttccatctcattccacagggggactcacttttagttctccagaaacaagccatatttgtgacagaaatttaagtatttccaccaaaaattctttgagactcaggccttcaatgaggaattgataacctttcatgtatgaatcctaattgttccttgaatttccaaacatgagtattctgataacatcttacactattttatttttattttatatattaatgtttactgcatttaccatactttcttcaggaaccacaagtgtaatcttttgtaaacagtatttattagattacatataataagcaacaatagtatatgatccttcttttatagttagaccttgaaacaagtctaaactatttttaaattatttgcaaaaaatgtgactaataaaaatccctagtctattttcaggtagattcttgtactttgagattatcataatcttctaactgatattttatatttttctaaaaacttttataagttctttagttttatttcaggcttgaacattggttctgatttgtatatcaacatatcagaagaattagtcaactaaagtttgaaaacctatgtagcagagatctggttcagaaactgcttctatactatacatttaaaaattaatcagcaattgatggtattatttttatattaagaaatgataggaacattgacactaatgtggaggaatttgccaaatattttatttcaaaatttagcctctgatatcataaccacaagatattttaaatcaacagtttctaagcatactaccacagtttttatgacctctccatcatcttgtggtttctagagattgacagatactatgtttgttttatagatatggtaattaatgaaacaactttaaattgtcttccattctttcttcctcagttcatttctttttgtcttcccactgatagtctttggcagctcttgaataaattctacctgttggcatcaaggggaagaaaattagcctggaaatttttatctttacataaagccaattatatagcagtttgattatgaattctaggtggaagaattagaatagtctttggaatgggttttgggtaacagccaaaatagggaaaagggtattgttaggaaagttgtcttgatattaagtatttactgtgagtccagtaagccaaaggaccaaacaaaataggttcagggtttcattttaatctcaaagattctgattcttacccatatgtcatcagttcagtttgggacatgtggtgcagcatgtgtgaagaaaatattcattaaaatgtaaaaataaacacttgaaattgtccacaacactgagcaaatattcgttataattaggatgcctacctttctgggatatttgtaaggtgctgtagtttttttaacatgctcctgaatctcctttattagttgttcttgatcatgtgacttgtaatcaggatttagaacgacaaaagcctttactacctaaaataaatatttgaaacaccagg

SEQ ID NO: 732 - DNA, 60 bp, Homo sapiens
tagttgttcttgatcatgtgacttgtaatcaggatttagaacgacaaaagcctttactac

SEQ ID NO: 733 - DNA, 4786 bp, Homo sapiens
ctcggcgctgaaattcaaatttgaacggctgcagaggccgagtccgtcactggaagccgagaggagaggacagctggttgtgggagagttcccccgcctcagactcctggttttttccaggagacacactgagctgagactcacttttctcttcctgaatttgaaccaccgtttccatcgtctcgtagtccgacgcctggggcgatggatccgtttacggagaaactgctggagcgaacccgtgccaggcgagagaatcttcagagaaaaatggctgagaggcccacagcagctccaaggtctatgactcatgctaagcgagctagacagccactttcagaagcaagtaaccagcagcccctctctggtggtgaagagaaatcttgtacaaaaccatcgccatcaaaaaaacgctgttctgacaacactgaagtagaagtttctaacttggaaaataaacaaccagttgagtcgacatctgcaaaatcttgttctccaagtcctgtgtctcctcaggtgcagccacaagcagcagataccatcagtgattctgttgctgtcccggcatcactgctgggcatgaggagagggctgaactcaagattggaagcaactgcagcctcctcagttaaaacacgtatgcaaaaacttgcagagcaacggcgccgttgggataatgatgatatgacagatgacattcctgaaagctcactcttctcaccaatgccatcagaggaaaaggctgcttcccctcccagacctctgctttcaaatgcctcggcaactccagttggcagaaggggccgtctggccaatcttgctgcaactatttgctcctgggaagatgatgtaaatcactcatttgcaaaacaaaacagtgtacaagaacagcctggtaccgcttgtttatccaaattttcctctgcaagtggagcatctgctaggatcaatagcagcagtgttaagcaggaagctacattctgttcccaaagggatggcgatgcctctttgaataaagccctatcctcaagtgctgatgatgcgtctttggttaatgcctcaatttccagctctgtgaaagctacttctccagtgaaatctactacatctatcactgatgctaaaagttgtgagggacaaaatcctgagctacttccaaaaactcctattagtcctctgaaaacgggggtatcgaaaccaattgtgaagtcaactttatcccagacagttccatccaagggagaattaagtagagaaatttgtctgcaatctcaatctaaagacaaatctacgacaccaggaggaacaggaattaagcctttcctggaacgctttggagagcgttgtcaagaacatagcaaagaaagtccagctcgtagcacaccccacagaacccccattattactccaaatacaaaggccatccaagaaagattattcaagcaagacacatcttcatctactacccatttagcacaacagctcaagcaggaacgtcaaaaagaactagcatgtcttcgtggccgatttgacaagggcaatatatggagtgcagaaaaaggcggaaactcaaaaagcaaacaactagaaaccaaacaggaaactcactgtcagagcactcccctcaaaaaacaccaaggtgtttcaaaaactcagtcacttccagtaacagaaaaggtgaccgaaaaccagataccagccaaaaattctagtacagaacctaaaggtttcactgaatgcgaaatgacgaaatctagccctttgaaaataacattgtttttagaagaggacaaatccttaaaagtaacatcagacccaaaggttgagcagaaaattgaagtgatacgtgaaattgagatgagtgtggatgatgatgatatcaatagttcgaaagtaattaatgacctcttcagtgatgtcctagaggaaggtgaactagatatggagaagagccaagaggagatggatcaagcattagcagaaagcagcgaagaacaggaagatgcactgaatatctcctcaatgtctttacttgcaccattggcacaaacagttggtgtggtaagtccagagagtttagtgtccacacctagactggaattgaaagacaccagcagaagtgatgaaagtccaaaaccaggaaaattccaaagaactcgtgtccctcgagctgaatctggtgatagccttggttctgaagatcgtgatcttctttacagcattgatgcatatagatctcaaagattcaaagaaacagaacgtccatcaataaagcaggtgattgttcggaaggaagatgttacttcaaaactggatgaaaaaaataatgcctttccttgtcaagttaatatcaaacagaaaatgcaggaactcaataacgaaataaatatgcaacagacagtgatctatcaagctagccaggctcttaactgctgtgttgatgaagaacatggaaaagggtccctagaagaagctgaagcagaaagacttcttctaattgcaactgggaagagaacacttttgattgatgaattgaataaattgaagaacgaaggacctcagaggaagaataaggctagtccccaaagtgaatttatgccatccaaaggatcagttactttgtcagaaatccgcttgcctctaaaagcagattttgtctgcagtacggttcagaaaccagatgcagcaaattactattacttaattatactaaaagcaggagctgaaaatatggtagccacaccattagcaagtacttcaaactctcttaacggtgatgctctgacattcactactacatttactctgcaagatgtatccaatgactttgaaataaatattgaagtttacagcttggtgcaaaagaaagatccctcaggccttgataagaagaaaaaaacatccaagtccaaggctattactccaaagcgactcctcacatctataaccacaaaaagcaacattcattcttcagtcatggccagtccaggaggtcttagtgctgtgcgaaccagcaacttcgcccttgttggatcttacacattatcattgtcttcagtaggaaatactaagtttgttctggacaaggtcccctttttatcttctttggaaggtcatatttatttaaaaataaaatgtcaagtgaattccagtgttgaagaaagaggttttctaaccatatttgaagatgttagtggttttggtgcctggcatcgaagatggtgtgttctttctggaaactgtatatcttattggacttatccagatgatgagaaacgcaagaatcccataggaaggataaatctggctaattgtaccagtcgtcagatagaaccagccaacagagaattttgtgcaagacgcaacacttttgaattaattactgtccgaccacaaagagaagatgaccgagagactcttgtcagccaatgcagggacacactctgtgttaccaagaactggctgtctgcagatactaaagaagagcgggatctctggatgcaaaaactcaatcaagttcttgttgatattcgcctctggcaacctgatgcttgctacaaacctattggaaagccttaaaccgggaaatttccatgctatctagaggtttttgatgtcatcttaagaaacacacttaagagcatcagatttactgattgcattttatgctttaagtacgaaagggtttgtgccaatattcactacgtattatgcagtatttatatcttttgtatgtaaaactttaactgatttctgtcattcatcaatgagtagaagtaaatacattatagttgattttgctaaatcttaatttaaaagcctcattttcctagaaatctaattattcagttattcatgacaatatttttttaaaagtaagaaattctgagttgtcttcttggagctgtaggtcttgaagcagcaacgtctttcaggggttggagacagaaacccattctccaatctcagtagttttttcgaaaggctgtgatcatttattgatcgtgatatgacttgttactagggtactgaaaaaaatgtctaaggcctttacagaaacatttttagtaatgaggatgagaactttttcaaatagcaaatatatattggcttaaagcatgaggctgtcttcagaaaagtgatgtggacataggaggcaatgtgtgagacttgggggttcaatattttatatagaagagttaataagcacatggtttacatttactcagctactatatatgcagtgtggtgcacattttcacagaattctggcttcattaagatcattatttttgctgcgtagcttacagacttagcatattagttttttctactcctacaagtgtaaattgaaaaatctttatattaaaaaagtaaactgttatgaagctgctatgtactaataatactttgcttgccaaagtgtttgggttttgttgttgtttgtttgtttgtttgtttttggttcatgaacaacagtgtctagaaacccattttgaaagtggaaaattattaagtcacctatcacctttaaacgcctttttttaaaattataaaatattgtaaagcagggtctcaacttttaaatacactttgaacttcttctctgaattattaaagttctttatgacctcatttataaacactaaattctgtcacctcctgtcattttattttttattcattcaaatgtattttttcttgtgcatattataaaaatatattttatgagctcttactcaaataaatacctgtaaatgtctaaaggaaaaaaaaaaaaaaaaaa

SEQ ID NO: 734 - DNA, 60 bp, Homo sapiens
ttccatgctatctagaggtttttgatgtcatcttaagaaacacacttaagagcatcagat

SEQ ID NO: 735 - DNA, 2052 bp, Homo sapiens
ttcatagttctgtacatgtggctggatttaaatatcctgtttttgatactaattttgaaagtcatgtaacttcttttgatatctgggcaaaagtaaccatatgctataagcatttgaatatgtttaattttatcataatagcatctgtaaaagtacatcttacacattatatagagggttcttgtttgaaattttcagttctctttatcttcccagtacctcttggtcctcataatgggcaaaggatacaacgaaggtaggttgtataggggttatagtggggaagtggataggggattcattttcttatatgacattttgccttaagaatataaaagtgctttagcactgatggctggcatttttaatataggcagtgaaagtgactttagaagcatgggatgaaatagagggaagaagagtttttattttctggcctttaaaaagtgcctagtaggtcatttgagacccagagaaatgcacagagcttgagcaaaggcatgaagtccctgacattgttttcctttttgtctcagcatatagtattaagatgcctagaaataggactctattgttccctcttgtataggcactttacatttcttgttgtcactacagcaaccacatacagtacagacaacctccaaacctgtttatattagtgtaaatagaaaatctatagacaactttctagttttctctggaggcatttttgggaatgtacgtgtaataggctctgctttgtatacaggagataataccacatcatcggttatctccaaactccagtcttctctcaactgcccagttgtatgttgtcatcaatcactttttcaaggctgggtagagacaagtttctcctcgtaactttgacctctcccactctccaaatgtaatctggacctcattgctttcaaggtcagcttccccatagctcaggtatcctttgccctcctgtatcttcatttactattagtgaagagatctctgtcctggaggttattctaaactttctttgtaactattgttatagacaatggtttccaaaccagtggtttctatgtagcttttctagttccttgctatcttctcaccactggcttgaggtagtgatttggactttgctcattagagagcattatcagagatgtggagtccatcagaagaccagcttgcagtgtgtatagcatatagatgccaatattagaattctttaaattatatttaacattttcatgcttcttaatttaacttcacatgttgggaagtagattcagaaagataggagaaatacccagactctaccacttccgtgagctactagttaggcatgggcaggattaagttttatgtgtattatcttcccactaccaagaatggttatgtttcacagaataccagttcagtttgatttggaaaaagatgccaaaccaaatttatatgtagtctataatctaagggcattcttgaaactattgcccacatcccattttttttttcatgtttacttacaaaacagagataaacattagatgtctaaaggagttagtaatgaaaagcctatccttaaaaataaacctgttgaaatgggctttaaagacatcgaaataatcacttgtcatgcattgactgtaaatgcagatagagaaatatgtctttgaagctccacttacacaaaaataaaacttgtatatcatgctccctcaaagaatgtgcgatagattattttaagaccatgataatagagtaaaaaggaaagaaagccagaaattacaattttggatgctaaaaagtaactttctagttaaccctaaagtcctgtcagattgtgaagaaatgttccaggatacacttggattagttatgcagtatttcttatcaatgtctagcccttgtatattgttctgaaaactaaagtttaaatctttatgctgttgcttgctagatatcctgttctttggtagaaaattcccatagtctgtactcaagaagtgcctaaaaatggatttgtgttgattttaagcccatctaataaattatatgtattttcta

SEQ ID NO: 736 - DNA, 60 bp, Homo sapiens
gaagaaatgttccaggatacacttggattagttatgcagtatttcttatcaatgtctagc

SEQ ID NO: 737 - DNA, 3057 bp, Homo sapiens
gagcttctccggcggcgaggggatagctggttaccagaaggacttctttgcagggccagtggtttctgtcagattttcgccggtcacgactgctgaatatgagacgatctgcagcaccaagtcagttgcaggggaattccttcaaaaaaccaaaatttatacctccaggaagaagtaatccaggtctgaatgaagagattacaaaactgaatccagatataaaattatttgagggtgttgcaattaataacacctttctcccgtcacaaaatgatcttagaatatgcagtttaaatctgcctagtgaagaaagtactagagaaatcaataacagagataattgcagtggaaaatattgttttgaagcacctacactggcaacattagatccacctcatacagttcattcggctcctaaagaagtagcagtgtccaaggaacaagaagagaaatctgatagcctagttaaatatttcagtgttgtttggtgtaagccttcaaagaaaaaacataaaaagtgggaaggtgatgctgttcttattgtaaaaggaaagtcatttatattaaagaatttggaaggcaaagacattggaagaggcattggttataaattcaaagagcttgaaaagattgaagagggccaaacactgatgatttgtggaaaagaaatagaagtcatgggtgtaatctctccagatgacttcagcagtggcaggtgttttcagcttggaggaggaagtactgctatctcgcattcttctcaggttgccaggaaatgtttctctaaccctttcaaaagtgtttgtaaaccaagttcaaaggaaaatagacagaatgatttccaaaattgcaaaccacgccatgacccatatacgccaaattccctcgttatgccacgaccagataagaatcaccagtgggtattcaataagaactgtttccctcttgtggatgtagtgattgatccttaccttgtatatcatcttcgaccacatcagaaagaaggaatcatattcctttatgaatgtgtaatgggaatgagaatgaatggcagatgtggagctattcttgctgatgaaatgggtttagggaagacattgcaatgtatttcgctcatctggaccctgcagtgtcagggaccctatggaggcaagccagtaataaagaagacactaattgtcacacctggaagcttggtgaataattggaagaaagaatttcaaaaatggctaggaagtgaaaggatcaagatatttactgttgatcaggaccacaaagttgaagaattcatcaagtctatattttattctgttcttattatcagttatgaaatgttacttcgttccctggatcaaattaagaatataaaatttgatcttctaatctgtgacgaggggcatcgtttgaagaacagtgccattaagacaactacagccctcattagcctttcttgtgagaaaagaataattctaactggtactccaattcagaatgatctgcaagaattttttgcattaattgattttgtaaatccaggaatattaggctctttgtcatcttataggaaaatatatgaagaacccatcattttatcgagagaaccttctgcttctgaggaagaaaaggagttaggagaaagaagagcagctgaacttacttgcctcactggactctttatccttagaagaacccaagaaattataaataaatatctcccacctaaaatagagaatgttgtcttttgccgaccaggagcactacagattgagctttatcgaaagctgttaaattctcaggttgtcaggttctgccttcaagggttgttggaaaatagtccccatctaatatgtataggagctcttaaaaaactgtgcaatcacccctgccttttgttcaactctataaaggaaaaggaatgtagctcaacttgtgataaaaatgaagaaaagagtctatacaaaggcttgctaagtgtgtttcctgctgactacaaccctctcctgtttactgaaaaggagtcaggaaaactacaggtgttgtccaagctcttagcggttatccacgaacttcgacctactgaaaaggtggtgttggtatccaactatacacaaaccttgaacattttacaagaagtatgtaagcgtcatggatatgcttatacaagacttgatggacaaacaccaatctctcaaaggcagcagattgttgatggctttaacagtcaacactcttctttttttatttttttgttaagttcaaaagctggtggtgtaggacttaacctcattggaggatctcacttaattctctatgacattgattggaatccagccactgacattcaggcaatgtctagagtatggagagatggtcagaaatatcctgtacatatttacagactcctaactacaggtacaatagaagaaaagatctatcaaaggcagatcagtaagcaaggtctttgtggggcagttgtcgacctcaccaagacatctgaacatattcagttttcagtagaagaacttaaaaatttgttcacattacatgaaagttcagattgtgttactcatgatctgcttgactgtgagtgtacaggagaagaagttcatacaggtgattcgttggaaaaattcattgtctctagagattgtcagcttggtccacatcaccagaaatctaactccctgaaacctctttctatgtcccagctgaagcaatggaaacatttttctggagatcatttaaatcttacagatccttttcttgaaagaataacagaaaatgtgtcattcatttttcagaatataaccactcaagctactggcacatagtgaaagattacttctgacattccattgctcttcttttgaaaattagtatggtaattaaatgtactttttgaaaattaatagaattatttaaattacagtatatgttgcaaaatatatcacttttgatacaatagtcaaaattgagtggtttaatgttttgtaaatattaagtgtttaaatgaaaaataaagatgtgcttatatcattgtaaaaaaaaaaaaaaaaa

SEQ ID NO: 738 - DNA, 60 bp, Homo sapiens
gagaagaagttcatacaggtgattcgttggaaaaattcattgtctctagagattgtcagc

SEQ ID NO: 739 - DNA, 3310 bp, Homo sapiens
ggcgggcgaccaaagcgcctgaggaccggcaacatggtgcggtcggggaataaggcagctgttgtgctgtgtatggacgtgggctttaccatgagtaactccattcctggtatagaatccccatttgaacaagcaaagaaggtgataaccatgtttgtacagcgacaggtgtttgctgagaacaaggatgagattgctttagtcctgtttggtacagatggcactgacaatcccctttctggtggggatcagtatcagaacatcacagtgcacagacatctgatgctaccagattttgatttgctggaggacattgaaagcaaaatccaaccaggttctcaacaggctgacttcctggatgcactaatcgtgagcatggatgtgattcaacatgaaacaataggaaagaagtttgagaagaggcatattgaaatattcactgacctcagcagccgattcagcaaaagtcagctggatattataattcatagcttgaagaaatgtgacatctccctgcaattcttcttgcctttctcacttggcaaggaagatggaagtggggacagaggagatggcccctttcgcttaggtggccatgggccttcctttccactaaaaggaattaccgaacagcaaaaagaaggtcttgagatagtgaaaatggtgatgatatctttagaaggtgaagatgggttggatgaaatttattcattcagtgagagtctgagaaaactgtgcgtcttcaagaaaattgagaggcattccattcactggccctgccgactgaccattggctccaatttgtctataaggattgcagcctataaatcgattctacaggagagagttaaaaagacttggacagttgtggatgcaaaaaccctaaaaaaagaagatatacaaaaagaaacagtttattgcttaaatgatgatgatgaaactgaagttttaaaagaggatattattcaagggttccgctatggaagtgatatagttcctttctctaaagtggatgaggaacaaatgaaatataaatcggaggggaagtgcttctctgttttgggattttgtaaatcttctcaggttcagagaagattcttcatgggaaatcaagttctaaaggtctttgcagcaagagatgatgaggcagctgcagttgcactttcctccctgattcatgctttggatgacttagacatggtggccatagttcgatatgcttatgacaaaagagctaatcctcaagtcggcgtggcttttcctcatatcaagcataactatgagtgtttagtgtatgtgcagctgcctttcatggaagacttgcggcaatacatgttttcatccttgaaaaacagtaagaaatatgctcccaccgaggcacagttgaatgctgttgatgctttgattgactccatgagcttggcaaagaaagatgagaagacagacacccttgaagacttgtttccaaccaccaaaatcccaaatcctcgatttcagagattatttcagtgtctgctgcacagagctttacatccccgggagcctctacccccaattcagcagcatatttggaatatgctgaatcctcccgctgaggtgacaacaaaaagtcagattcctctctctaaaataaagaccctttttcctctgattgaagccaagaaaaaggatcaagtgactgctcaggaaattttccaagacaaccatgaagatggacctacagctaaaaaattaaagactgagcaagggggagcccacttcagcgtctccagtctggctgaaggcagtgtcacctctgttggaagtgtgaatcctgctgaaaacttccgtgttctagtgaaacagaagaaggccagctttgaggaagcgagtaaccagctcataaatcacatcgaacagtttttggatactaatgaaacaccgtattttatgaagagcatagactgcatccgagccttccgggaagaagccattaagttttcagaagagcagcgctttaacaacttcctgaaagcccttcaagagaaagtggaaattaaacaattaaatcatttctgggaaattgttgtccaggatggaattactctgatcaccaaagaggaagcctctggaagttctgtcacagctgaggaagccaaaaagtttctggcccccaaagacaaaccaagtggagacacagcagctgtatttgaagaaggtggtgatgtggacgatttattggacatgatataggtcgtggatgtatggggaatctaagagagctgccatcgctgtgatgctgggagttctaacaaaacaagttggatgcggccattcaaggggagccaaaatctcaagaaattcccagcaggttacctggaggcggatcatctaattctctgtggaatgaatacacacatatatattacaagggataatttagaccccatacaagtttataaagagtcattgttattttctggttggtgtattattttttctgtggtcttactgatctttgtatattacatacatgctttgaagtttctggaaagtagatcttttcttgacctagtatatcagtgacagttgcagcccttgtgatgtgattagtgtctcatgtggaaccatggcatggttattgatgagtttcttaaccctttccagagtcctcctttgcctgatcctccaacagctgtcacaacttgtgttgagcaagcagtagcatttgcttcctcccaacaagcagctgggttaggaaaaccatgggtaaggacggactcacttctctttttagttgaggccttctagttaccacattactctgcctctgtatataggtggttttctttaagtggggtgggaaggggagcacaatttcccttcatactccttttaagcagtgagttatggtggtggtctcatgaagaaaagaccttttggcccaatctctgccatatcagtgaacctttagaaactcaaaaactgagaaatttacttcagtagttagaattatatcacttcactgttctctacttgcaagcctcaaagagagaaagtttcgttatattaaaacacttaggtaacttttcggtctttcccatttctacctaagtcagctttcatctttgtggatggtgtctcctttactaaataagaaaataacaaagcccttattctctttttttcttgtcctcattcttgccttgagttccagttcctctttggtgtacagacttcttggtacccagtcacctctgtcttcagcaccctcataagtcgtcactaatacacagttttgtacatgtaacattaaaggcataaatgactc

SEQ ID NO: 740 - DNA, 60 bp, Homo sapiens
ctacctaagtcagctttcatctttgtggatggtgtctcctttactaaataagaaaataac

SEQ ID NO: 741 - DNA, 1398 bp, Homo sapiens
cagtcgcctgtgtacctttgtactttctacagtgaaagttgctacaggatctccctttctcaataaattcatctgcggtggagaaaatcagcatgagtactacaggccaagtcatcagatgcaaagcagccatactctggaagcctggtgcaccattttctattgaagaggtagaagtggccccaccaaaggcaaaggaggttcgcataaaggttgtggccaccggactgtgtggtacagagatgaaagtgttggggagtaaacacttggacctcttgtatcccaccatcttgggccatgaaggggctggaatcgttgagagtattggagaaggagtaagcacagtgaaaccaggtgacaaagttatcacactctttctgccacagtgtggagaatgtacctcttgcctgaattctgagggcaatttttgtatacaattcaaacagtcaaaaacccaactgatgtctgatggtaccagcaggtttacctgcaagggaaaatcaatatatcactttggtaataccagcaccttctgtgaatacacagtgataaaggaaatctcagttgccaagattgatgcagtcgctcctctagagaaagtatgcctaattagctgtggcttttccactgggtttggtgctgcaatcaatactgccaaggtgactccaggttctacctgtgctgtgtttggcctgggaggagtcggcttgtctgttgtcatgggttgtaaagcagcaggagcagccaggatcattggagtggatgtcaacaaggagaaatttaagaaggcacaggaattgggtgcgactgagtgcctcaaccctcaggacttaaagaaacccattcaagaagttttatttgatatgacagatgctggtatagacttctgctttgaggccattggaaatctggacgttctggcagctgccctcgcctcctgcaatgagagctatggggtctgtgtggttgttggggtgttgcctgccagtgttcaactcaaaatcagtggccagttgttcttctcaggacgttctttgaagggttctgtttttggaggctggaagagcagacagcacatccctaaactggttgctgattatatggcagagaagttgaatctagatccactaattactcatactctgaatcttgataaaatcaatgaagcagttgaattaatgaaaactggaaaatggtaaactgcccacataaattttatgtctgtgtgtttgagaccaagagaaagggtgtattggcttgggagtagaagaagggtcgtccctgctgcagaagctgtatactgataattgaagaggctttcaggaatttgtaaagcatctccttcccctctgcattttgttttatttctagctaataaaatacataatcctgaaagta

SEQ ID NO: 742 - DNA, 60 bp, Homo sapiens
ggttgctgattatatggcagagaagttgaatctagatccactaattactcatactctgaa

SEQ ID NO: 743 - DNA, 5198 bp, Homo sapiens
ctcacttaaacacgtagttcccgcgaccccaacgtcccagaggcggggccggagtcggcggtggcgctccttggagccggctcccgctcctaccctgcaaacagacctcagctccgcggaagttgcgagacggggtttcaccatgttggtcgggctggtctggaaatcctgacttcaggtgatccacccgcctcggcctcccaaaatgctgggattacaagcgtgagccaccgcccctgacatgagccattgacttttaaagcaggagaataatttggatcagatttatatggaaacactcttctagcagcattatggggacttttccataagtctggatactgaggatttggaattaaagaaatcattcaccagacatcatggagcctatatatccttttgcacggccccagatgaataccaggtttccttcaagcaggatggtacctttccactttcctccatcaaaatgtgcactttggaacccaacgccaactggagatttcatctacttacatctcagttactacagaaatccaaagcttgtggtgactgagaagaccatccgacttgcttatcgtcatgctaacgagaataaaaaaaattcgtcatgctttttacttggttctctgacagcagacgaagatgaagaaggtgtaacattgacagtagatcgctttgatcctggtcgagaagtacctgaatgcctagaaataacccctactgcttctcttcctggggactttttgattccatgcaaagttcatactcaagaactttgttcaagagaaatgatagttcacagtgtagatgacttcagttcagctttaaaggctctacagtgccatatatgtagcaaagattccttggactgtggtaagctgctttccctaagagttcatatcacttccagggagagtttggacagtgtggaatttgacttgcattgggcagcagtaactctagcaaataactttaaatgcacacctgtgaagcccatccccattattccaacagctctggcaagaaacttgagcagtaatctgaatatttctcaagttcaagggacttataaatatggatatcttaccatggatgaaacacgcaaattgttacttttgttggaatctgatcccaaggtttattctctaccattggtgggaatttggctgtctggaattacacatatctatagtcctcaggtatgggcttgctgtttgcgatacatattcaattcttctgttcaagaaagggttttttcagaatctggaaatttcatcatagttctctattctatgacacataaggaacctgagttttatgaatgcttcccttgtgatggcaagatacctgactttcggtttcagttgctaaccagtaaggaaacattacatcttttcaaaaatgttgaacctcctgacaaaaatccaatccgttgtgaactgagcgctgaaagccaaaatgcagaaacagagtttttcagtaaggcttccaagaatttttcaattaagaggtcttcccaaaagttatcttctgggaagatgccaatacatgatcacgactctggtgttgaagatgaagatttttctccaagaccaattcctagtcctcatccagtgagtcagaagatttctaagatccaaccatcagttcctgaactttcacttgtgttggatggcaatttcatagaatcaaaccctctgcctactccattggaaatggtgaataatgaaaatcctcctttgattaaccacttggaacacttgaagccattgcaaccccagctttatgatgagaaacacagtccagaagttgaagctggagagccttccttgagaggaataccaaatcagttaaaccaggataaaccagctcttttgagacactgcaaagtaagacagccacctgcctataagaaagggaacccccataccaggaacagtattaaaccatcttctcataatgggccatctcatgatatatttgaaaagctccaaacagtttctgctggaaatgtacaaaacgaagagtatcctataagaccctccacacttaattctaggcagtcttctcttgccccgcagtcccaaccacacgattttgttttttcaccccataattcaggaagaccaatggaacttcagatacctactcccccactgccatcttactgttccacaaacgtttgcaggtgttgtcagcatcatagtcatattcaatatagtccgctaaattcttggcaaggagcaaacacagttggatccattcaagatgtccagtctgaagcccttcaaaagcattcattatttcacccaagtggatgtccagccctgtactgtaatgcattctgttcttcaagtagtcctatagccttgagacctcagggagatatgggcagttgttctccccacagcaatattgaaccatcgcctgtggcaagaccgccttcacatatggacttatgtaacccacagccttgcacagtgtgcatgcacacacccaagactgagtcagataatggaatgatgggactatctccagatgcatatcggttcctcacagaacaagacagacagctaagactacttcaggcacagattcagcgtttgttggaagcacagtctctgatgccctgttcccctaagacaactgctgttgaagacacagtgcaagctggaagacaaatggagttggtttctgtggaagcacagtcttcccctggcttgcacatgagaaaaggtgtaagcattgctgtgagcacaggtgctagcttgttttggaatgcagcaggtgaggatcaagagcctgactctcaaatgaagcaagatgataccaaaatttccagtgaggacatgaatttttctgtcgatattaataatgaagtcacaagtcttccaggtagtgcatcttcattaaaagcagttgatattcccagttttgaagagagcaacattgctgtggaagaagaatttaaccagccactttctgtatccaactcttctctagttgtgagaaaagaacctgatgtacctgtgttctttccaagtggccagctggcagaaagtgtaagcatgtgtttacagactggaccaacagggggtgccagtaacaattctgaaacatcagaggaaccaaaaattgagcatgtaatgcaacccttgcttcatcaaccatcagataaccagaaaatttaccaggatttattgggtcaagtaaaccacctattaaatagttcctccaaggaaactgagcagccgtctaccaaagcagtaattatcagtcatgaatgcaccagaacccaaaacgtttaccatacaaagaaaaaaacacatcattcaagactggtggacaaagattgtgtccttaatgcaactcttaagcaactaagaagccttggagtaaaaattgattctcccactaaagtgaagaaaaatgcacataacgtggatcacgccagtgtgttggcatgcatcagcccagaagcagtgatctctggattaaactgcatgtcatttgctaatgttggcatgagcggcttaagccccaatggtgtggatttgagcatggaggcaaatgctatagctctgaaatatttaaatgaaaatcagctgtcacaactgtctgtcactcgatcgaaccaaaataattgtgacccattcagccttctccatattaatacagacagaagcacagtggggcttagtttaatttcaccaaacaacatgtcatttgcaaccaaaaaatatatgaagagatatggactcctacaaagcagtgacaatagtgaagatgaagaggaacctcccgacaatgcagatagcaagagtgaatatttattgaatcagaaccttaggtccatacccgaacagcttggtggtcagaaagagccttctaagaatgaccatgaaataattaattgttctaactgtgaatctgtggggaccaacgcagatacgccagtattgagaaatattacaaatgaagttttgcagacaaaagcaaaacagcagttgactgaaaagccagctttcttagtaaagaaccttaaaccaagtcctgcagtgaaccttcgaaccgggaaagcagagttcactcaacatcctgagaaagaaaatgaaggggacattacaatttttcctgaaagtttgcaaccttctgaaacgctaaagcagatgaatagcatgaattcagtaggcaccttcttagatgtaaaacgtctcagacagttaccaaaattattttaaccttttaactccctgcccttttaatacagggacagggtgtctcctgaagatacttagggaaaacaggagcctaccacaaggctcctgatcattctggagtcactgtttcttggtagcagccaattgggaagagtgacttctgtgagatggctggctggtgataggactaagttctcattgttcaaatagagctgttcaacatcactgaaacctttaagaaaagccctgagatcagttattcctacaagtttaagtagtagacagatactatccagctctaagtctcaactgctcttttatactgtacttttttttttgagacggagttttgctcttgtagcccaggctggagtgcaatggcaggatctcagatcactgcaacctctgcctcctgggttcaagcgattttcctgcttcatcttcccaggtagctgggattacaggcatgtgccacaacgcctggctaattttgtatttttagtagagactggtttctccatgttggtcaggctggtctcaaactcccgacctcaggtgatccgcccgcctcggcctcctaaagtgctgggattacaggcgtgagccactgcccagctatactgtatatttaagaaggtccagcatgttgcatctctgcattatcctatatcataaaagaagcataagttatcatggtgttgggtaaattagcgaaatcaaccgcttcctaagtttaagggaaaagttatttttaaaaacaacttaataaaaacttacactcttatacaagagtgtatttccccttaattaggatgcatgttgattaaactcgagatacagctttttgcagtatggtgggttggttttggtgtaacatcttcaacatgtcacactggctatcaaagaataagaaaattattgagtatgagtgtgttttataaactttctgagtttttcagatgtcttaatattttt

SEQ ID NO: 744 - DNA, 60 bp, Homo sapiens
tacaagagtgtatttccccttaattaggatgcatgttgattaaactcgagatacagcttt

SEQ ID NO: 745 - DNA, 3889 bp, Homo sapiens
cgcggttagtaccgcggtgggcgccggggctcccgggaatctaccttctcctgcggccggcacgcggttcccagggggccagcggcggtcagccgaggtcgagacgcccgcagggtggccttagcggccggtcgtaccacggcagccccgccgatcaggttcctttgggagacttcgacttgttggcgacctgatggccaaaagaaaggaagaaaatttttcctctcctaaaaatgccaaaaggccaagacaagaagaattggaggattttgataaagatggtgacgaagacgaatgtaaaggtactactttgactgcagcagaagttggaataattgagagtattcacctaaaaaacttcatgtgtcattcaatgcttggaccttttaagtttggttctaatgtcaactttgttgttggcaacaatggaagtgggaagagtgcagtactcacagctctcatagtcggtcttggtggaagagcagttgctactaatagaggatcctctttaaaaggttttgtgaaagatggacagaactctgcagatatctcaataacattgaggaacagaggagatgatgcctttaaagccagtgtgtatggtaactctatacttatacagcaacacatcagcatagatggaagtcgatcttataaacttaaaagtgcaacaggctccgtggtttccacgaggaaagaagagctgattgcaattcttgatcattttaacatccaggtggataatccagtttctgttttaacacaagaaatgagcaagcagttcttacagtctaaaaatgaaggagacaaatacaaattcttcatgaaagcaacgcaacttgaacagatgaaggaagattattcatacattatggaaacgaaagaaagaacaaaggagcagatacatcaaggagaagagcggcttactgaactaaagcgccagtgtgtagagaaagaggaacgttttcaaagtattgctggtttaagtacaatgaagactaatttagagtccttgaaacatgaaatggcttgggcagtggtcaatgaaattgaaaaacaattgaatgccatcagagataatatcaaaattggagaagatcgtgctgctagacttgacaggaaaatggaagaacagcaggtcagacttaatgaggcagaacaaaagtacaaggatattcaagacaaactagaaaagattagtgaagagacaaatgcacgagcaccagaatgtatggcattgaaagcagatgttgttgctaagaaaagggcctataatgaagctgaggttttatataaccgatccttaaacgaatataaagcattaaagaaagatgatgagcagctttgtaaacgaattgaagagctgaaaaaaagtactgaccaatctttggaacctgaacggttggaaagacaaaaaaaaatatcttggttaaaagagagagtaaaggcctttcaaaatcaagaaaattcagtcaatcaagagatcgaacagtttcagcaagccatagaaaaggacaaagaagaacatggcaaaattaagagagaagaattagatgtgaagcatgcactgagctacaatcagaggcaactgaaagaattgaaagatagtaaaactgatcgactcaaaagatttggccctaatgttccagctcttcttgaagccatagatgatgcttatagacaaggacattttacctataaacctgtaggccctttaggagcttgcattcatcttcgggacccagaacttgctttggctattgaatcttgcttaaaagggcttctgcaggcctattgttgccataatcatgctgatgaaagggtccttcaggcactcatgaaaaggttttatttaccagggacctcacggccaccgataatagtttctgagtttcggaatgagatatatgatgtaagacacagagctgcttatcatccagactttccaacagttctgacagctttagaaatagataatgcggttgtggcaaatagcctaattgacatgagaggcatagagacagtgctactaatcaaaaataattctgtagctcgtgcagtaatgcagtcccaaaagccacccaaaaattgtagagaagcttttactgctgatggtgatcaagtttttgcaggacgttattattcatctgaaaatacaagacctaagttcctaagcagagatgtggattctgaaataagtgacttggagaatgaggttgaaaataagacggcccagatattaaatcttcagcaacatttatctgcccttgaaaaagatattaaacacaatgaggaacttcttaaaaggtgccaactacattataaagaactaaagatgaaaataagaaaaaatatttctgaaattcgggaacttgagaacatagaagaacaccagtctgtagatattgcaactttggaagatgaagctcaggaaaataaaagcaaaatgaaaatggttgaggaacatatggagcaacaaaaagaaaatatggagcatcttaaaagtctgaaaatagaagcagaaaataagtatgatgcaattaaattcaaaattaatcaactatcggagctagcagacccacttaaggatgaattaaaccttgctgattctgaagtggataaccaaaaacgagggaaacgacattatgaagaaaaacaaaaagaacacttggataccttaaataaaaagaaacgagaactggatatgaaagagaaagaactagaggagaaaatgtcacaagcaagacaaatctgcccagagcgtatagaagtagaaaaatctgcatcaattctggacaaagaaattaatcgattaaggcagaagatacaggcagaacatgctagtcatggagatcgagaggaaataatgaggcagtaccaagaagcaagagagacctatcttgatctggatagtaaagtgaggactttaaaaaagtttattaaattactgggagaaatcatggagcacagattcaagacatatcaacaatttagaaggtgtttgactttacgatgcaaattatactttgacaacttactatctcagcgggcctattgtggaaaaatgaattttgaccacaagaatgaaactctaagtatatcagttcagcctggagaaggaaataaagctgctttcaatgacatgagagccttgtctggaggtgaacgttctttctccacagtgtgttttattctttccctgtggtccatcgcagaatctcctttcagatgcctggatgaatttgatgtctacatggatatggttaataggagaattgccatggacttgatactgaagatggcagattcccagcgttttagacagtttatcttgctcacacctcaaagcatgagttcacttccatccagtaaactgataagaattctccgaatgtctgatcctgaaagaggacaaactacattgcctttcagacctgtgactcaagaagaagatgatgaccaaaggtgatttgtaacttaacatgccttgtcctgatgttgaaggatttgtgaagggaaaaaaaattctggactctttgatataataaaatgagactggaggcattctgaaatgaaagaaactcctttatatatccaaccacaatcaaacatataaataagcctggaaaaccaactacaacctgcaatttaagattactattactttaagaaaatcaatttcatagtattggttttaaatctttttaagtttttttaatacgatctatttttataggttctttttcagaagtaaaattttgtacatatatacatgtacatatctgtttagtttgggttcatttctataacattttgtaagaaaataaaagtttgagcacctgaaaaaaaaaaaaaaaaaaaaaaaaaaaaaaaaaaaaaaaaaaaaaaa

SEQ ID NO: 746 - DNA, 60 bp, Homo sapiens
gttgtagttttgaatgttgtgctctttcatacagaacgggaaacataatcctcaggtatc

SEQ ID NO: 747 - DNA, 6782 bp, Homo sapiens
gttgtcgtaggggcccggtccgtgagggactgctaaggaagaggctgcatggcgcggtagtcccccgagtggaggtcggctgcccctgggaaaccagagagtcggagggagtccatctggagcggccaagtaggtcggggaagggccgcgcctgacgtctggccgcaggtggtgactctcaaaaggaaataggatcatggcagcagatgatgacaatggtgatggaacaagtttatttgatgtcttttctgcttctcctcttaagaacaatgatgaaggctcactggacatatacgctgggttggacagtgctgtttctgacagcgcttccaaatcctgtgtaccatcaagaaattgtttggacttatatgaagagatcctgactgaagaaggaactgcaaaggaggcaacatataatgatttgcaagtagaatatggaaaatgtcaactacaaatgaaagagctgatgaaaaaatttaaagaaatacagacacagaatttcagcttaataaacgaaaaccagtctcttaagaagaatatttcagcacttatcaaaactgccagagtggaaataaaccgcaaggatgaagaaataagtaatcttcaccaaagattgtctgagtttccacattttcgaaataatcataaaactgcaaggacatttgatacagttaaaacaaaagatcttaaatctagatctccacatttggatgattgttcaaagactgatcacagagctaaaagtgatgtttctaaagatgtacatcatagcacttcactgccaaatctggaaaaggaaggaaaaccacattctgataaaaggagtacttcacatttacctacatctgttgagaaacactgcactaatggtgtttggtcacgttctcattatcaggttggcgagggtagctcaaatgaggatagtagaagaggaagaaaagatattagacatagccagtttaacagaggaactgaaagagtacgaaaagacttaagtactggctgtggtgatggtgaaccaaggatattggaggctagtcaaaggctacaaggacatcctgagaaatatggtaaaggtgaaccaaagactgaaagcaaaagttcgaagtttaaaagtaactcagattctgactataaaggtgaacgcattaactcttcttgggagaaagagacccctggagaaaggtcacacagtcgagtagactctcaaagtgacaaaaaactagaaagacaaagtgaaagatcacaaaatataaataggaaagaagttaaatcacaagacaaagaagaaagaaaagttgatcaaaaacctaaatcagtagtaaaggaccaagatcactggagaagatctgaacgagcatcacttcctcattccaagaatgaaataacattttctcataattcaagtaaataccatctagaagagagaagaggatgggaagattgtaaaagagacaagagtgtaaacagtcatagttttcaagatggaagatgtccatcttctctttcaaacagtagaactcacaaaaacattgactctaaggaagttgatgccatgcatcagtgggaaaatacacctttaaaagcagaaagacatagaactgaagataagaggaaaagagaacaagaaagcaaagaagaaaataggcatattagaaatgaaaaaagagtacctacagaacatttgcagaagactaataaggaaactaagaaaaccactactgatttaaagaaacagaatgaaccaaagactgataagggagaagtccttgataatggtgtttctgaaggagcagataataaagagcttgcaatgaaagctgagagtggtccaaatgaaacaaaaaacaaggacctaaaattgagttttatgaaaaaattgaacttaactctttctcctgctaaaaagcaacctgtttcccaggataatcagcataaaataactgatattcccaagtccagtggtgtatgtgattcagagtcttcaatgcaagttaaaacagtggcatatgttccctccataagtgaacatatcttgggggaagcagctgtcagtgaacataccatgggggaaaccaagtcaacgttattggaaccaaaggttgctcttctagcagtgactgaacccaggatcggtatctcagaaaccaacaaggaagacgaaaatagtttgttagttaggtctgttgacaatactatgcattgtgaagagcccatttgtggtacagagacttccttcccatctcctatggaaatacaacagacagaatccttgtttccatcaacaggaatgaaacaaaccattaataatggaagggcagcagctcctgtggtaatggatgtattacaaacagatgtgtctcaaaactttggcttggaattggataccaaaagaaatgataattcagattattgtggtatttctgaaggtatggagatgaaggtggcactttcaacaacagtgagtgaaaccactgaaagcattttgcagccttcaattgaggaagctgatattttgccaataatgctttcagaagataataacccaaaatttgagccttctgttatagttacaccactggttgagagtaagtcgtgtcatctggagccttgcttacctaaagagactctagattcttcacttcagcagactgagttaatggaccacagaatggcaactggtgaaacaaactcagtatatcatgatgatgataactcggttttgagcattgaccttaatcacctgagacctattccagaagccatcagtcctctgaatagtccagtgagacctgtagcaaaagttcttagaaatgaaagcccacctcaagttccagtgtataataacagtcataaagatgtgtttttaccaaattcagctcattctacctctaagagtcagtctgatctcaataaggaaaatcaaaagccaatttacaaatctgacaaatgtacagaagcagacacatgtaagaattcaccattagatgaattagaagaaggagaaattagaagtgatagtgaaacatctaaaccacaagaaagttttgaaaaaaattccaaacgtagagtgtcagctgatgtgcggaagtcaaagactatcccacgacgtgggaaaagtactgtgtgtttagataaagacagtaggaaaacacatgtaagaatccatcagaccaataacaaatggaataaaagacctgataaatctagcagatcttcaaaaacagagaagaaagataaagtgatgagcacttccagcttggaaaaaatagttccaattattgctgtaccctcttctgaacaagagatcatgcacatgttacgaatgataagaaaacatgtaagaaaaaattatatgaaattcaaggcaaaattttcattaatacaatttcacagaattattgagtcagcaattttgagttttacatctttaattaaacatctcaacttacacaaaatctctaagtcagtgactaccttacagaagaatctctgtgatattatagagtctaaacttaagcaagttaaaaagaatggcatagttgatcgtttatttgaacagcaactaccagatatgaaaaaaaaattgtggaagtttgtagatgaccaacttgattatttgtttgcaaagcttaagaaaatcttagtatgtgattccaaaagctttggaagagatagtgatgaaggcaaacttgaaaaaacaagtaaacagaatgcacagtattcaaatagtcagaaaaggagtgtggacaactccaacagagaattgctgaaagaaaaattatcaaaatcagaagaccctgttcattataagtctttagtgggatgtaaaaaatctgaggaaaattatcaagaccaaaataactccagtattaacactgtaaagcatgacattaaaaaaaattttaacatctgctttgataatataaagaactctcaatccgaagagcgctccttggaagtacactgtccaagcaccccaaagtcagaaaaaaacgaaggaagcagcatagaggatgcacagacatcccagcatgcaactttgaagccagaacgaagtttcgagattcttaccgaacagcaagcatcgagccttacttttaatttagtgagtgatgcacaaatgggtgaaatatttaaaagtttgttgcaaggttctgatcttttagacagcagtgttaactgtactgaaaaaagtgagtgggagttaaagactccagagaagcagctgctagagactcttaagtgcgagtctataccagcttgtacaacagaagagctagtttcaggggtggcttctccatgtcctaaaatgattagtgatgataattggtcattattatcatctgaaaaaggtccatctctgtcttcagggctttcattgccggttcatcctgatgtgttggatgaaagttgtatgtttgaagtgtctactaacctacctttaagtaaagataatgtgtgtagtgtagaaaagagcaagccctgcgtttcttccatacttcttgaagatctagcagtctctttaacagtaccatcgcctctgaagtcagatggtcatctcagttttttaaagcctgatatgtcgtccagttcaactcctgaagaagtcattagtgctcattttagtgaagatgccttacttgaggaagaggatgcatctgagcaagatattcatttagctctggagtctgataattcaagcagtaaatcaagttgttcttcttcctggacaagccgatctgttgctccaggctttcagtaccaccctaatctacctatgcatgccgtcataatggaaaagtccaatgatcatttcattgtgaaaatacgacgtgcaacaccatctacctcttctggccttaaacagagtatgatgcctgatgaattattgacatctttgcccagacatggaaaggaagctgatgaaggaccagagaaagaatatatttcatgtcagaacacagtttttaaatctgtggaggaattggaaaactccaacaaaaatgttgatggcagcaagtcaactcatgaagaacagagctctatgatacaaacacaggttcctgatatatatgaatttcttaaagatgcttcagataagatgggtcatagtgatgaagtggctgatgaatgtttcaaattgcatcaagtatgggaaacaaaagtgcctgaaagcattgaagaattgccttcaatggaagaaatctcacactctgttggggaacatcttccaaacacatacgtagatctaacgaaagatccagtcactgaaaccaaaaacttgggggaattcatagaagtaacagttttacatattgatcagttgggatgttctggaggcaatttaaatcagagtgctcaaatattagacaattctttgcaggctgatactgtaggtgcttttattgatttgacacaagatgcttcaagtgaggctaaaagtgaaggtaatcatcctgcattagctgtggaagacttgggatgtggggtgatacaggtagatgaagataattgtaaggaagaaaaggcacaagtggcaaacaggcctttaaaatgcattgttgaggaaacctatatcgacttgaccacagaatctcccagttcatgtgaagtaaaaaaagatgagttaaaatcagagccaggatcaaattgtgataactcggagttgcctgggactttgcataattctcacaaaaagagaagaaacatttctgatctaaatcatcctcataaaaaacaaagaaaggaaacagacttaactaataaggaaaagaccaagaaacctacccaagattcttgtgagaatactgaagctcaccaaaagaaagccagtaagaagaaggcccctcctgtgactaaagatccctcatcattaaaggcaaccccagggattaaggattcatcagcagcacttgccacttctacaagtctttctgcaaaaaatgttattaaaaagaagggagaaattatcattttatggacaagaaatgatgaccgggaaattttattggagtgtcagaaaagagggccatcatttaaaacatttgcatatttagccgccaagttggataaaaatccaaatcaggtctcagaaagattccagcagctaatgaagctctttgaaaagtcaaaatgcagataagttgctgaattcctgggactcttaactgatattgcatactacacagaagcttcaaattcctcatgttttaaatgagcactagagggaggtttatcacctttttggttaccagatgataatctatatttgttattactcagtgactctctaatttcacatcagcatgttcagcttgtgctagtcatcattctgatttgcttatctgtttttggtcaaaatatttatttttaaacatgttagaacttaccaaaatgaaagcaacagtgatgtattgaaatcttagttttgatattttaaagaaatgactttctagattaaaaaaatagttttgtagcattttaaacttagtgactatttagttcaattgttcatccattttttatttgcttttataattgcctccttgttttggtatattgtaaaataatttaaataatgtatttataaatatgtataattatgatgtaaaataccgtgtgtatatgtatgtatgtgtgtttctgtatatgcacacacataaacggctttgcctagccaaggattttttttatctgtataaaactttttgtataaagtttgctttcaataacagtaatgtataataaaaccatgtaaagttttgttgtaaaaaaaaaaa

SEQ ID NO: 748 - DNA, 60 bp, Homo sapiens
aaatgagcactagagggaggtttatcacctttttggttaccagatgataatctatatttg

SEQ ID NO: 749 - DNA, 5698 bp, Homo sapiens
aggttcaagtggagctctcctaaccgacgcgcgtctgtggagaagcggcttggtcgggggtggtctcgtggggtcctgcctgtttagtcgctttcagggttcttgagccccttcacgaccgtcaccatggaagtgtcaccattgcagcctgtaaatgaaaatatgcaagtcaacaaaataaagaaaaatgaagatgctaagaaaagactgtctgttgaaagaatctatcaaaagaaaacacaattggaacatattttgctccgcccagacacctacattggttctgtggaattagtgacccagcaaatgtgggtttacgatgaagatgttggcattaactatagggaagtcacttttgttcctggtttgtacaaaatctttgatgagattctagttaatgctgcggacaacaaacaaagggacccaaaaatgtcttgtattagagtcacaattgatccggaaaacaatttaattagtatatggaataatggaaaaggtattcctgttgttgaacacaaagttgaaaagatgtatgtcccagctctcatatttggacagctcctaacttctagtaactatgatgatgatgaaaagaaagtgacaggtggtcgaaatggctatggagccaaattgtgtaacatattcagtaccaaatttactgtggaaacagccagtagagaatacaagaaaatgttcaaacagacatggatggataatatgggaagagctggtgagatggaactcaagcccttcaatggagaagattatacatgtatcacctttcagcctgatttgtctaagtttaaaatgcaaagcctggacaaagatattgttgcactaatggtcagaagagcatatgatattgctggatccaccaaagatgtcaaagtctttcttaatggaaataaactgccagtaaaaggatttcgtagttatgtggacatgtatttgaaggacaagttggatgaaactggtaactccttgaaagtaatacatgaacaagtaaaccacaggtgggaagtgtgtttaactatgagtgaaaaaggctttcagcaaattagctttgtcaacagcattgctacatccaagggtggcagacatgttgattatgtagctgatcagattgtgactaaacttgttgatgttgtgaagaagaagaacaagggtggtgttgcagtaaaagcacatcaggtgaaaaatcacatgtggatttttgtaaatgccttaattgaaaacccaacctttgactctcagacaaaagaaaacatgactttacaacccaagagctttggatcaacatgccaattgagtgaaaaatttatcaaagctgccattggctgtggtattgtagaaagcatactaaactgggtgaagtttaaggcccaagtccagttaaacaagaagtgttcagctgtaaaacataatagaatcaagggaattcccaaactcgatgatgccaatgatgcagggggccgaaactccactgagtgtacgcttatcctgactgagggagattcagccaaaactttggctgtttcaggccttggtgtggttgggagagacaaatatggggttttccctcttagaggaaaaatactcaatgttcgagaagcttctcataagcagatcatggaaaatgctgagattaacaatatcatcaagattgtgggtcttcagtacaagaaaaactatgaagatgaagattcattgaagacgcttcgttatgggaagataatgattatgacagatcaggaccaagatggttcccacatcaaaggcttgctgattaattttatccatcacaactggccctctcttctgcgacatcgttttctggaggaatttatcactcccattgtaaaggtatctaaaaacaagcaagaaatggcattttacagccttcctgaatttgaagagtggaagagttctactccaaatcataaaaaatggaaagtcaaatattacaaaggtttgggcaccagcacatcaaaggaagctaaagaatactttgcagatatgaaaagacatcgtatccagttcaaatattctggtcctgaagatgatgctgctatcagcctggcctttagcaaaaaacagatagatgatcgaaaggaatggttaactaatttcatggaggatagaagacaacgaaagttacttgggcttcctgaggattacttgtatggacaaactaccacatatctgacatataatgacttcatcaacaaggaacttatcttgttctcaaattctgataacgagagatctatcccttctatggtggatggtttgaaaccaggtcagagaaaggttttgtttacttgcttcaaacggaatgacaagcgagaagtaaaggttgcccaattagctggatcagtggctgaaatgtcttcttatcatcatggtgagatgtcactaatgatgaccattatcaatttggctcagaattttgtgggtagcaataatctaaacctcttgcagcccattggtcagtttggtaccaggctacatggtggcaaggattctgctagtccacgatacatctttacaatgctcagctctttggctcgattgttatttccaccaaaagatgatcacacgttgaagtttttatatgatgacaaccagcgtgttgagcctgaatggtacattcctattattcccatggtgctgataaatggtgctgaaggaatcggtactgggtggtcctgcaaaatccccaactttgatgtgcgtgaaattgtaaataacatcaggcgtttgatggatggagaagaacctttgccaatgcttccaagttacaagaacttcaagggtactattgaagaactggctccaaatcaatatgtgattagtggtgaagtagctattcttaattctacaaccattgaaatctcagagcttcccgtcagaacatggacccagacatacaaagaacaagttctagaacccatgttgaatggcaccgagaagacacctcctctcataacagactatagggaataccatacagataccactgtgaaatttgttgtgaagatgactgaagaaaaactggcagaggcagagagagttggactacacaaagtcttcaaactccaaactagtctcacatgcaactctatggtgctttttgaccacgtaggctgtttaaagaaatatgacacggtgttggatattctaagagacttttttgaactcagacttaaatattatggattaagaaaagaatggctcctaggaatgcttggtgctgaatctgctaaactgaataatcaggctcgctttatcttagagaaaatagatggcaaaataatcattgaaaataagcctaagaaagaattaattaaagttctgattcagaggggatatgattcggatcctgtgaaggcctggaaagaagcccagcaaaaggttccagatgaagaagaaaatgaagagagtgacaacgaaaaggaaactgaaaagagtgactccgtaacagattctggaccaaccttcaactatcttcttgatatgcccctttggtatttaaccaaggaaaagaaagatgaactctgcaggctaagaaatgaaaaagaacaagagctggacacattaaaaagaaagagtccatcagatttgtggaaagaagacttggctacatttattgaagaattggaggctgttgaagccaaggaaaaacaagatgaacaagtcggacttcctgggaaaggggggaaggccaaggggaaaaaaacacaaatggctgaagttttgccttctccgcgtggtcaaagagtcattccacgaataaccatagaaatgaaagcagaggcagaaaagaaaaataaaaagaaaattaagaatgaaaatactgaaggaagccctcaagaagatggtgtggaactagaaggcctaaaacaaagattagaaaagaaacagaaaagagaaccaggtacaaagacaaagaaacaaactacattggcatttaagccaatcaaaaaaggaaagaagagaaatccctggtctgattcagaatcagataggagcagtgacgaaagtaattttgatgtccctccacgagaaacagagccacggagagcagcaacaaaaacaaaattcacaatggatttggattcagatgaagatttctcagattttgatgaaaaaactgatgatgaagattttgtcccatcagatgctagtccacctaagaccaaaacttccccaaaacttagtaacaaagaactgaaaccacagaaaagtgtcgtgtcagaccttgaagctgatgatgttaagggcagtgtaccactgtcttcaagccctcctgctacacatttcccagatgaaactgaaattacaaacccagttcctaaaaagaatgtgacagtgaagaagacagcagcaaaaagtcagtcttccacctccactaccggtgccaaaaaaagggctgccccaaaaggaactaaaagggatccagctttgaattctggtgtctctcaaaagcctgatcctgccaaaaccaagaatcgccgcaaaaggaagccatccacttctgatgattctgactctaattttgagaaaattgtttcgaaagcagtcacaagcaagaaatccaagggggagagtgatgacttccatatggactttgactcagctgtggctcctcgggcaaaatctgtacgggcaaagaaacctataaagtacctggaagagtcagatgaagatgatctgttttaaaatgtgaggcgattattttaagtaattatcttaccaagcccaagactggttttaaagttacctgaagctcttaacttcctcccctctgaatttagtttggggaaggtgtttttagtacaagacatcaaagtgaagtaaagcccaagtgttctttagctttttataatactgtctaaatagtgaccatctcatgggcattgttttcttctctgctttgtctgtgttttgagtctgctttcttttgtctttaaaacctgatttttaagttcttctgaactgtagaaatagctatctgatcacttcagcgtaaagcagtgtgtttattaaccatccactaagctaaaactagagcagtttgatttaaaagtgtcactcttcctccttttctactttcagtagatatgagatagagcataattatctgttttatcttagttttatacataatttaccatcagatagaactttatggttctagtacagatactctactacactcagcctcttatgtgccaagtttttctttaagcaatgagaaattgctcatgttcttcatcttctcaaatcatcagaggccaaagaaaaacactttggctgtgtctataacttgacacagtcaatagaatgaagaaaattagagtagttatgtgattatttcagctcttgacctgtcccctctggctgcctctgagtctgaatctcccaaagagagaaaccaatttctaagaggactggattgcagaagactcggggacaacatttgatccaagatcttaaatgttatattgataaccatgctcagcaatgagctattagattcattttgggaaatctccataatttcaatttgtaaactttgttaagacctgtctacattgttatatgtgtgtgacttgagtaatgttatcaacgtttttgtaaatatttactatgtttttctattagctaaattccaacaattttgtactttaataaa

SEQ ID NO: 750 - DNA, 60 bp, Homo sapiens
gatgattctgactctaattttgagaaaattgtttcgaaagcagtcacaagcaagaaatcc

SEQ ID NO: 751 - DNA, 2318 bp, Homo sapiens
gattgagatacttttatatcaattctgttacactgagcctttagtcatactaagagaatgcagaagaagttataggaaaacgaatcttcactgaaactagtattatataatcttgaattagatgtttaaaaaactttatagcttgatataaaatgagttgaaaattattatttaataggaagcagcattagatttttgtcacctgttttcagataatatttctagtctatgtatgttatttaatttttacactttggcccattgtttattttccttaaggaattcatcaaatgcaatgaaatttgaataaaattgatcatagcaataaataatttttaaattcagcacaaactcatcttgagtatattatcaatcaggcttcctttagcaataagaatggtgaatcaacatccagtactaaattcaataaatgatgaatactttaaatacaagaaaaagttgaattgcagaaaagaagaggggctaaaaaggaagaaagttttaattctcaacaagaaacactatttagatggaaagcttaaatgtattcttattaagggtatttgatgatgcattttatttgcaaaaataaccagtgggtaattttttctctgaaaatttagctttaataagtcgtaaaatttcctaaagattttggagacgatatttcgattataccagctcttgcttttattttgggagcctggagaaatgagagtgattgcacctgtcaaattttgtatctcatcacttttggatcatcacactgtgactaaaatgacttcagcattttgttggccaccacagtgaagaactattccctgaaagttaatcagttgcctgagagacttttctgctactgaggggaaagaaaggaaagctttatttacctctaatgagctccgttccaagtcagttaatcactgttcccttacacccaagagtttcatcagtatcagagtcaacttgtcaaaacactggttctcagacgtgtttttcagagggacttcttttccccacatggccagatttctttacaattaagaaaataagagctacagcgtattcttggttaaaaaccagtttagatgatgttaccaaatgaaaacaagtctgtattagcaaatgtcacattatatttagtcgtattctcactaaattctccgttattaaaatgatttctgcatcttgcctggaaaatgcacttacatatttacaagcgttgtatgtcagtgtgcatgttttgaatttcctaacagtgtctaatcttagtagtttcatagtagttatgtaaaatctctttaactgcaaaatactataaaatattacttgaaatattaaagtattagtgccatttctagctgtggcaaggcacaagtcttactatagcttacttatgtcttctcatagatttcagtacagcatctgagtagtggatctgtttactgacagtatacacaaactaggtcttgacctcacttctttcttcatttaaaaggagaagatttgaaatagagctagtgtaaataataaataaaattatttaaatagcatcagtggctcaataccatctgttgaggaataaaataatttggttaacatacagaacatcgataatatacaataatgactttttaaaaaatgagtctgatctttttggctcacctagcttcccttaataagaaaatttgagaaacttggatctgaaaagtgtagttgtacttcctaacattaaattcctggctgtaatagttaatactttggcagcattatggttagtcttgtttatgccattggcacttactaggctaaactttctgaaactgattggttttgacctatgagataaggaaacatgcctaagaaatggctagaaatgctatttattgccctatgataagtgaaatagcaaatcactcttgattcttaaaatttcatattaaaattagctagttcctacatgcatgcgtgcacaagtatatgcagacacacacacaaatcagtaatctatgtgaactagatactaatactaaattactatttaaattgggtccagaaagatgctgttttgaaaagaacactaaaaatatttcattagcgtttccttgataacaaataggaaaatgtatgtttacaccctgaataaattcagctgtgggtggatttttgtttttcaaaatgattttgttagtttgaatgaaacctaaatataacattcaagtcaattcttttaacatttttctttataacagaatatgaaaaacgctgtcttaaagtgttgtaacttttctgaattttcaataaaatattttgcttgc

SEQ ID NO: 752 - DNA, 60 bp, Homo sapiens
gcacttactaggctaaactttctgaaactgattggttttgacctatgagataaggaaaca

SEQ ID NO: 753 - DNA, 2312 bp, Homo sapiens
tcattaataagacaaactactggtgaaaaaaagaaccctttccgatattttagtaaacaagaattaagagagctctttacaatcgaggatcttcagaactctgtaacccagctgcagcttcagtctttgcatgctgctcagaggaaatctgatataaaactagatgaacatattgcctacctgcagtctttggggatagctggaatctcagaccatgatttgatgtacacatgtgatctgtctgttaaagaagagcttgatgtggtagaagaatctcactatattcaacaaagggttcagaaagctcaattcctcgttgaattcgagtctcaaaataaagagttcctgatggaacaacaaagaactagaaatgagggggcctggctaagagaacctgtatttccttcttcaacaaagaagaaatgccctaaattgaataaaccacagcctcagccttcacctcttctaagtactcatcatactcaggaagaagatatcagttccaaaatggcaagtgtagtcattgatgatctgcccaaagagggtgagaaacaagatctctccagtataaaggtgaatgttaccaccttgcaagatgggtaaggtacaggtagtgctgactctataactactttaccaaaggggtttggaagtgtagaagaactttgtactaactcttcattgggaatggaaaaaagctttgcaactaaaaatgaagctgtacaaaaagagacattacaagaggggcctaagcaggaggcactgcaagaggatcctctggaaagttttaattatgtacttagcaaatcaaccaaagctgatattgggccaaatttagatcaactaaaggatgatgagattttacgtcattgcaatccttggcccattatttccataacaaatgaaagtcaaaatgcagaatcaaatgtatccattattgaaatagctgatgacctttcagcatcccatagtgcactgcaggatgctcaagcaagtgaggccaagttggaagaggaaccttcagcatcttcaccacagtatgcatgtgatttcaatcttttcttggaagactcagcagacaacagacaaaatttttccagtcagtctttagagcatgttgagaaagaaaatagcttgtgtggctctgcacctaattccaaagcagggtttgtgcatagcaaaacatgtctcagttgggagttttctgagaaagacgatgaaccagaagaagtagtagttaaagcaaaaatcagaagtaaagctagaaggattgtttcagatggcgaagatgaagatgattcttttaaagatacctcaagcataaatccattcaacacatctctctttcaattctcatctgtgaaacaatttgatgcttcaactcccaaaaatgacatcagtccaccaggaaggttcttttcatctcaaatacccagtagtgtaaataagtctatgaactctagaagatctctggcttctaggaggtctcttattaatatggttttagaccacgtggaggacatggaggaaagacttgacgacagcagtgaagcaaagggtcctgaagattatccagaagaaggggtggaggaaagcagtggcgaagcctccaagtatacagaagaggatccttccggagaaacactgtcttcagaaaacaagtccagctggttaatgacgtctaagcctagtgctctagctcaagagacctctcttggtgcccctgagcctttgtctggtgaacagttggttggttctccccaggataaggcggcagaggctacaaatgactatgagactcttgtaaagcgtggaaaagaactaaaagagtgtggaaaaatccaggaggccctaaactgcttagttaaagcgcttgacataaaaagtgcagatcctgaagttatgctcttgactttaagtttgtataagcaacttaataacaattgagaatgtaacctgtttattgtattttaaagtgaaactgaatatgagggaatttttgttcccataattggattctttgggaacatgaagcattcaggcttaaggcaagaaagatctcaaaaagcaacttctgccctgcaacgccccccactccatagtctggtattctgagcactagcttaatatttcttcacttgaatattcttatattttaggcatattctataaatttaactgtgttgtttcttggaaagttttgtaaaattattctggtcattcttaattttactctgaaagtgatcatctttgtatataacagttcagataagaaaattaaagttacttttctcaaaaaaaaaaaaaaaaaa

SEQ ID NO: 754 - DNA, 60 bp, Homo sapiens
agtgaaactgaatatgagggaatttttgttcccataattggattctttgggaacatgaag

SEQ ID NO: 755 - DNA, 3117 bp, Homo sapiens
attcgaaccccgtcgcgcccctttgtgcgtcacgggtggcgggcgcgggaaggggatttggattgttgcgcctctgctctgaagaaagtgctgtctggctccaactccagttctttcccctgagcagcgcctggaacctaacccttcccactctgtcaccttctcgatcccgccggcgctttagagccgcagtccagtcttggatccttcagagcctcagccactagctgcgatgcatgtgatcaagcgagatggccgccaagaacgagtcatgtttgacaaaattacatctcgaatccagaagctttgttatggactcaatatggattttgttgatcctgctcagatcaccatgaaagtaatccaaggcttgtacagtggggtcaccacagtggaactagatactttggctgctgaaacagctgcaaccttgactactaagcaccctgactatgctatcctggcagccaggatcgctgtctctaacttgcacaaagaaacaaagaaagtgttcagtgatgtgatggaagacctctataactacataaatccacataatggcaaacactctcccatggtggccaagtcaacattggatattgttctggccaataaagatcgcctgaattctgctattatctatgaccgagatttctcttacaattacttcggctttaagacgctagagcggtcttatttgttgaagatcaatggaaaagtggctgaaagaccacaacatatgttgatgagagtatctgttgggatccacaaagaagacattgatgcagcaattgaaacatataatcttctttctgagaggtggtttactcatgcttcgcccactctcttcaatgctggtaccaaccgcccacaactttctagctgttttcttctgagtatgaaagatgacagcattgaaggcatttatgacactctaaagcaatgtgcattgatttctaagtctgctggaggaattggtgttgctgtgagttgtattcgggctactggcagctacattgctgggactaatggcaattccaatggccttgtaccgatgctgagagtatataacaacacagctagatatgtggatcaaggtgggaacaagcgtcctggggcatttgctatttacctggagccttggcatttagacatctttgaattccttgatttaaagaagaacacaggaaaggaagagcagcgtgccagagatcttttctttgctctttggattccggatctcttcatgaaacgagtggagactaatcaggactggtctttgatgtgtccaaatgagtgtcctggtctggatgaggtttggggagaggaatttgagaaactatatgcaagttatgagaaacaaggtcgtgtccgcaaagttgtaaaagctcagcagctttggtatgccatcattgagtctcagacggaaacaggcaccccgtatatgctctacaaagattcctgtaatcgaaagagcaaccagcagaacctgggaaccatcaaatgcagcaacctgtgcacagaaatagtggagtacaccagcaaagatgaggttgctgtttgtaatttggcttccctggccctgaatatgtatgtcacatcagaacacacatacgactttaagaagttggctgaagtcactaaagtcgttgtccgaaacttgaataaaattattgatataaactactatcctgtaccagaggcatgcctatcaaataaacgccatcgccccattggaattggggtacaaggtctggcagatgcttttatcctgatgagatacccttttgagagtgcagaagcccagttactgaataagcagatctttgaaactatttattatggtgctctggaagccagctgtgaccttgccaaggagcagggcccatacgaaacctatgagggctctccagttagcaaaggaattcttcagtatgatatgtggaatgttactcctacagacctatgggactggaaggttctcaaggagaagattgcaaagtatggtataagaaacagtttacttattgccccgatgcctacagcttccactgctcagatcctggggaataatgagtccattgaaccttacaccagcaacatctatactcgcagagtcttgtcaggagaatttcagattgtaaatcctcacttattgaaagatcttaccgagcggggcctatggcatgaagagatgaaaaaccagattattgcatgcaatggctctattcagagcataccagaaattcctgatgacctgaagcaactttataaaactgtgtgggaaatctctcagaaaactgttctcaagatggcagctgagagaggtgctttcattgatcaaagccaatctttgaacatccacattgctgagcctaactatggcaaactcactagtatgcacttctacggctggaagcagggtttgaagactgggatgtattatttaaggacaagaccagcagctaatccaatccagttcactctaaataaggagaagctaaaagataaagaaaaggtatcaaaagaggaagaagagaaggagaggaacacagcagccatggtgtgctctttggagaatagagatgaatgtctgatgtgtggatcctgaggaaagacttggaagagaccagcatgtcttcagtagccaaactacttcttgagcatagataggtatagtgggtttgcttgaggtggtaaggctttgctggaccctgttgcaggcaaaaggagtaattgatttaaagtactgttaatgatgttaatgatttttttttaaactcatatattgggattttcaccaaaataatgcttttgaaaaaaagaaaaaaaaaacggatatattgagaatcaaagtagaagttttaggaatgcaaaataagtcatcttgcatacagggagtggttaagtaaggtttcatcacccatttagcatgcttttctgaagacttcagttttgttaaggagatttagttttactgctttgactggtgggtctctagaagcaaaactgagtgataactcatgagaagtactgataggacctttatctggatatggtcctataggttattctgaaataaagataaacatttctaagtgaaaaaaaaaaaaaaaa

SEQ ID NO: 756 - DNA, 60 bp, Homo sapiens
taactcatgagaagtactgataggacctttatctggatatggtcctataggttattctga

SEQ ID NO: 757 - DNA, 60 bp, Homo sapiens
tgtgaagataatcatttggacaactcaaatccatcaacatgaccaatgtttttcatctgc

SEQ ID NO: 758 - DNA, 1294 bp, Homo sapiens
gcccttgcagagaagatgttgcccctgtccatcaaagacgatgaatacaaaccacccaagttcaatttgttcggcaagatctcgggctggtttaggtctatactgtccgacaagacttcccggaacctgtttttcttcctgtgcctgaacctctctttcgcttttgtggaactactctacggcatctggagcaactgcttaggcttgatttccgactcttttcacatgtttttcgatagcactgccattttggctggactggcagcttctgttatttcaaaatggggagataatgatgctttctcctatgggtatgttagagcggaagttctggctggctttgtcaatggcctatttttgatcttcactgctttttttattttctcagaaggagttgagagagcattagcccctccagatgtccaccatgagagactgcttcttgtttccattcttgggtttgtggtaaacctaataggaatatttgttttcaaacatggaggtcatggacattctcatggctctggccacggacacagtcattccctctttaatggtgctctagatcaggcacatggccatgtcgatcattgccatagccatgaagtgaaacatggtgctgcacatagccatgatcatgctcatggacatggacactttcattctcatgatggcccgtccttaaaagaaacaacaggacccagcagacagattttacaaggtgtatttttacatatcctagcagatacacttggaagtattggtgtaattgcttctgccatcatgatgcaaaattttggtctgatgatagcagatcctatctgttcaattcttatagccattcttatagttgtaagtgttattcctcttttaagagaatctgttggaatattaatgcagagaactcctcccctattagaaaatagtctgcctcagtgctatcagagggtacagcagttgcaaggagcttacagtttacaggaacagcacttctggactttatgttctgacgtttatgttgggaccttgaaattaatagtagcacctgatgctgatgctaggtggattttaagccaaacacataatatttttactcaggctggagtgagacagctctacgtacagattgactttgcagccatgtagtgaatggaaagaaattatgcaccttttatggaccaaatttttctggtactgtacgatccaaaacattgtacccagctttttaaaagagagaaattatcactacaactcccgagcactaagtagacggggtagagtcaagccgaagggc

SEQ ID NO: 759 - DNA, 60 bp, Homo sapiens
cagttagcctcaatgaagattctattttgaactagacatcctgtcaatagtttgtcaagt

SEQ ID NO: 760 - DNA, 3740 bp, Homo sapiens
cgctgggatggccgccacagctgtaggtgctgctagtgtttagcgctggtctttgccgggcgttgagggcagctcagcctccttgtttgtccggttcgcctgtgcgtggtactcaagggcaccagtattcccgcggtcggcagcatgggtcgggagtcacgccactatcgaaaacgatcggcatcccggggtcgctctggaagtcggtctagaagtcgctcaccctcagacaaaagaagtaaacgtggagatgacagacggtctagaagtagagatagagataggaggagagagaggtctcgtagcagggataaaagaagatctcggtcaagggacaggaagcgtctgagacgttccagaagtagagagagagacagaagccgagagcgaagaagatctcgaagtagagacaggagacgctcaaggagtagaagccggggccggcgatcccgatcctccagtcctggaaataaaagcaagaaaactgagaatagatctaggtccaaagagaaaactgatggtggggaaagttctaaagagaagaaaaaagacaaagatgacaaggaggatgaaaaagaaaaagatgctggcaactttgaccagaataagctggaagaagaaatgagaaagcgaaaagaaagagtagaaaaatggcgagaagagcaacgtaaaaaggctatggaaaacataggagaactgaaaaaggaaatcgaagagatgaaacaagggaaaaagtggagtttagaggacgatgatgatgacgaagatgatcctgcagaagctgaaaaggagggaaatgaaatggagggtgaggagttagatccattagatgcttacatggaagaagtgaaagaggaagtaaaaaaatttaacatgagaagtgtaaaaggtggtgggggaaatgaaaagaagtctgggccaacggtcacaaaagttgtcactgttgtgacaaccaaaaaagcagttgtggattctgataagaagaaaggtgagctgatggagaatgaccaggatgccatggagtattcttcagaggaggaagaagttgatcttcagacagcccttacagggtatcaaacaaaacagcgaaagcttctagaaccagttgatcatggaaaaattgagtatgagccatttaggaaaaacttctatgttgaagttccagaactagcaaaaatgtctcaagaagaggtaaatgtgtttcgattggaaatggagggcattacagttaaaggaaaaggttgccccaaaccaattaaatcctgggtccagtgtggaatttccatgaagatcttaaattccctcaagaagcatggctatgaaaagcccacgcccatccaaacccaagctattcctgctataatgtctggacgagatttgattggcattgccaaaacaggaagtggaaagaccattgcttttctgttgcccatgtttagacacatcatggatcagaggtcattagaggaaggagaggggccaatagctgtcatcatgactccaactcgagaactggctttacagattactaaagagtgtaagaagttttccaagactttgggacttagagtggtctgtgtttacggaggaacaggaatcagtgagcagattgctgagctgaaaagaggtgctgaaattattgtttgcacacctggtcgaatgattgacatgttagccgctaacagtggtcgggtcacaaatcttcgaagagtgacatatgttgttttagatgaagcagacagaatgtttgacatgggttttgaaccccaggtcatgcgcatcgtggataatgttcgtcctgatcgacagacggttatgttttcagctactttccccagagctatggaggctttggctcgcaggatcctcagtaaacctattgaagtacaagttggaggcaggagtgtggtttgctcagatgtggagcaacaagtgattgtgattgaagaagaaaagaaattcttgaagttacttgagcttctaggccattatcaagagtcaggatctgtcattatatttgtggataagcaggaacatgctgatggtcttcttaaggatttaatgagagcatcttatccttgcatgtctcttcatggaggcattgatcaatatgacagagatagcatcataaatgactttaagaatgggacctgcaaacttcttgtggctacctctgttgctgcccgaggtctagatgtgaaacatctgattcttgtagtaaattatagctgccccaaccattatgaggattatgtacacagagcagggcggactggaagagcaggaaacaagggttatgcttatacttttatcacagaggatcaagctcgctatgctggtgacataattaaagctcttgaattgtcagggactgcagtacctcctgatttagagaaactgtggagtgatttcaaagatcagcagaaagctgaggggaaaataattaaaaagagtagtgggttctctggtaagggattcaagtttgatgaaacagaacaagctttggctaatgagaggaagaagttacaaaaagcagctcttggtctacaagattcagatgatgaggatgctgcagttgatattgatgagcaaattgaaagcatgtttaattcaaagaagagagtaaaggatatggctgctcctggaacatcaagtgttcctgctccaactgcaggaaatgctgagaaattagaaattgctaagagattggctcttagaatcaatgcccagaagaatttgggcatcgagtctcaggtagatgtgatgcagcaggccaccaatgcaattcttaggggtggcaccattctggctcccactgtttctgcaaaaaccattgcagaacaacttgctgaaaagatcaatgccaagctcaattatgtgccgttagagaaacaagaagaagagagacaggatggtggacagaatgaatcttttaagagatatgaagaagaattagagatcaatgacttcccacagactgctaggtggaaagttacctctaaggaagctctgcagagaatcagtgaatactctgaagccgcaattacaatcagaggaacctacttccctcctggcaaagaacccaaggaaggcgagcggaagatttacttggcaattgaaagtgccaatgaactggctgtgcagaaagcaaaggcagaaatcaccaggctcataaaagaagagctgatccggctgcaaaattcataccaaccaacaaataaaggaagatacaaagtcttatagacatccggaaaaaagatttttacctgtgctggtctatgatgtatgtggcagttgctgtctgcagtttacaatgtattgtaaatgaagattttttaaattctatcttgctgattttttttaaatataagaaactggtacttggtaaagaaatctgtccgtaagtacccccacaatcagtcaaactatatttaaagccagcctgttttcagagtatgatgtcctttaatgtaaactcaaatatcaatattttaaatgtccggataatattctagaggtttaaaaaatggaaatatttgaactttctattgaagacaataaagtacacaagtcgttaaggggctattcactttatcctgtactttcaatgaaattgtgatcatttcctaagaaaaggtaaaattcactatcatattttgtgtccccaccttgatgttacatgactctggaacaatatgaactggatttaagaatgttataatagaagtcttacaaaatgg

SEQ ID NO: 761 - DNA, 60 bp, Homo sapiens
gtgatcatttcctaagaaaaggtaaaattcactatcatattttgtgtccccaccttgatg

SEQ ID NO: 762 - DNA, 2217 bp, Homo sapiens
ccttggctgctttcatctgaagcgccacttctcagaaacacacagagctttagctccgccaaaatgaaacactcattaaacgcacttctcattttcctcatcataacatctgcgtggggtgggagcaaaggcccgctggatcagctagagaaaggaggggaaactgctcagtctgcagatccccagtgggagcagttaaataacaaaaacctgagcatgcctcttctccctgccgacttccacaaggaaaacaccgtcaccaacgactggattccagagggggaggaggacgacgactatctggacctggagaagatattcagtgaagacgacgactacatcgacatcgtcgacagtctgtcagtttccccgacagactctgatgtgagtgctgggaacatcctccagctttttcatggcaagagccggatccagcgtcttaacatcctcaacgccaagttcgctttcaacctctaccgagtgctgaaagaccaggtcaacactttcgataacatcttcatagcacccgttggcatttctactgcgatgggtatgatttccttaggtctgaagggagagacccatgaacaagtgcactcgattttgcattttaaagactttgttaatgccagcagcaagtatgaaatcacgaccattcataatctcttccgtaagctgactcatcgcctcttcaggaggaattttgggtacacactgcggtcagtcaatgacctttatatccagaagcagtttccaatcctgcttgacttcagaactaaagtaagagagtattactttgctgaggcccagatagctgacttctcagaccctgccttcatatcaaaaaccaacaaccacatcatgaagctcaccaagggcctcataaaagatgctctggagaatatagaccctgctacccagatgatgattctcaactgcatctacttcaaaggatcctgggtgaataaattcccagtggaaatgacacacaaccacaacttccggctgaatgagagagaggtagttaaggtttccatgatgcagaccaaggggaacttcctcgcagcaaatgaccaggagctggactgcgacatcctccagctggaatacgtggggggcatcagcatgctaattgtggtcccacacaagatgtctgggatgaagaccctcgaagcgcaactgacaccccgggtggtggagagatggcaaaaaagcatgacaaacagaactcgagaagtgcttctgccgaaattcaagctggagaagaactacaatctagtggagtccctgaagttgatggggatcaggatgctgtttgacaaaaatggcaacatggcaggcatctcagaccaaaggatcgccatcgacctgttcaagcaccaaggcacgatcacagtgaacgaggaaggcacccaagccaccactgtgaccacggtggggttcatgccgctgtccacccaagtccgcttcactgtcgaccgcccctttcttttcctcatctacgagcaccgcaccagctgcctgctcttcatgggaagagtggccaaccccagcaggtcctagaggtggaggtctaggtgtctgaagtgccttgggggcaccctcattttgtttccattccaacaacgagaacagagatgttctggcatcatttacgtagtttacgctaccaatctgaattcgaggcccatatgagaggagcttagaaacgaccaagaagagaggcttgttggaatcaattctgcacaatagcccatgctgtaagctcatagaagtcactgtaactgtagtgtgtctgctgttacctagagggtctcacctccccactcttcacagcaaacctgagcagcgcgtcctaagcacctcccgctccggtgaccccatccttgcacacctgactctgtcactcaagcctttctccaccaggcccctcatctgaataccaagcacagaaatgagtggtgtgactaattccttacctctcccaaggagggtacacaactagcaccattcttgatgtccagggaagaagccacctcaagacatatgaggggtgccctgggctaatgttagggcttaattttctcaaagcctgacctttcaaatccatgatgaatgccatcagtccctcctgctgttgcctccctgtgacctggaggacagtgtgtgccatgtctcccatactagagataaataaatgtagccacatttactgtg

SEQ ID NO: 763 - DNA, 60 bp, Homo sapiens
catgctgtaagctcatagaagtcactgtaactgtagtgtgtctgctgttacctagagggt

SEQ ID NO: 764 - DNA, 3579 bp, Homo sapiens
tcaggctcgctgtcgcgccattttgccggggtttgaatgtgaggcggagcggcggcaggagcgggtagtgccagctacggtccgcggctggggttccctcctccgtttctgtatccccacgagatcctatagcaatggaactcagcgatgcaaatctgcaaacactaacagaatatttaaagaaaacacttgatcctgatcctgccatccgacgtccagctgagaaatttcttgaatctgttgaaggaaatcagaattatccactgttgcttttgacattactggagaagtcccaggataatgttatcaaagtatgtgcttcagtaacattcaaaaactatattaaaaggaactggagaattgttgaagatgaaccaaacaaaatttgtgaagccgatcgagtggccattaaagccaacatagtgcacttgatgcttagcagcccagagcaaattcagaagcagttaagtgatgcaattagcattattggcagagaagattttccacagaaatggcctgacttgctgacagaaatggtgaatcgctttcagagtggagatttccatgttattaatggagtcctccgtacagcacattcattatttaaaagataccgtcatgaatttaagtcaaacgagttatggactgaaattaagcttgttctggatgcctttgctttgcctttgactaatctttttaaggccactattgaactctgcagtacccatgcaaatgatgcctctgccctgaggattctgttttcttccctgatcctgatctcaaaattgttctatagtttaaactttcaggatctccctgaattttttgaagataatatggaaacttggatgaataattttcatactctcttaacattggataataagcttttacaaactgatgatgaagaggaagccggcttattggagctcttaaaatcccagatttgtgataatgccgcactctatgcacaaaagtacgatgaagaattccagcgatacctgcctcgttttgttacagccatctggaatttactagttacaacgggtcaagaggttaaatatgatttgttggtaagtaatgcaattcaatttctggcttcagtttgtgagagacctcattataagaatctatttgaggaccagaacacgctgacaagtatctgtgaaaaggttattgtgcctaacatggaatttagagctgctgatgaagaagcatttgaagataattctgaggagtacataaggagagatttggaaggatctgatattgatactagacgcagggctgcttgtgatctggtacgaggattatgcaagttttttgagggacctgtgacaggaatcttctctggttatgttaattccatgctgcaggaatacgcaaaaaatccatctgtcaactggaaacacaaagatgcagccatctacctagtgacatctttggcatcaaaagcccaaacacagaagcatggaattacacaagcaaatgaacttgtaaacctaactgagttctttgtgaatcacatcctccctgatttaaaatcagctaatgtgaatgaatttcctgtccttaaagctgacggtatcaaatatattatgatttttagaaatcaagtgccaaaagaacatcttttagtctcgattcctctcttgattaatcatcttcaagctgaaagtattgttgttcatacttacgcagctcatgctcttgaacggctctttactatgcgagggcctaacaatgccactctctttacagctgcagaaatcgcaccgtttgttgagattctgctaacaaaccttttcaaagctctcacacttcctggctcttcagaaaatgaatatattatgaaagctatcatgagaagtttttctctcctacaagaagccataatcccctacatccctactctcatcactcagcttacacagaagctattagctgttagtaagaacccaagcaaacctcactttaatcactacatgtttgaagcaatatgtttatccataagaataacttgcaaagctaaccctgctgctgttgtaaattttgaggaggctttgtttttggtgtttactgaaatcttacaaaatgatgtgcaagaatttattccatacgtctttcaagtgatgtctttgcttctggaaacacacaaaaatgacatcccgtcttcctatatggccttatttcctcatctccttcagccagtgctttgggaaagaacaggaaatattcctgctctagtgaggcttcttcaagcattcttagaacgcggttcaaacacaatagcaagtgctgcagctgacaaaattcctgggttactaggtgtctttcagaagctgattgcatccaaagcaaatgaccaccaaggtttttatcttctaaacagtataatagagcacatgcctcctgaatcagttgaccaatataggaaacaaatcttcattctgctattccagagacttcagaattccaaaacaaccaagtttatcaagagttttttagtctttattaatttgtattgcataaaatatggggcactagcactacaagaaatatttgatggtatacaaccaaaaatgtttggaatggttttggaaaaaattattattcctgaaattcagaaggtatctggaaatgtagagaaaaagatctgtgcggttggcataaccaaattactaacagaatgtcccccaatgatggacactgagtataccaaactgtggactccattattacagtctttgattggtctttttgagttacccgaagatgataccattcctgatgaggaacattttattgacatagaagatacaccaggatatcagactgccttctcacagttggcatttgctgggaaaaaagagcatgatcctgtaggtcaaatggtgaataaccccaaaattcacctggcacagtcacttcacaagttgtctaccgcctgtccaggaagggttccatcaatggtgagcaccagcctgaatgcagaagcgctccagtatctccaagggtaccttcaggcagccagtgtgacactgctttaaactgcatttttctaatgggctaaacccagatggtttcctaggaaatcacaggcttctgagcacagctgcattaaaacaaaggaagttctccttttgaacttgtcacgaattccatcttgtaaaggatattaaatgttgctttaacctgaaccttgagcaaattagttggtttgtgtgatcatacagttatgtgggtggcttctagtttgcaacttcaagggacaagtattaatagttcagtgtatggcgttggtttgtgttgagcgtttgcacggtttggataatcttaaattttgacggacactgtggagactttctgttactaaatccttttgttttgaagctgttgctatttgtatttctcttgtcctttatattttttgtctgtttatttacgcttttattggaaatgtgaataagtaaagaattacttgtgttacttgccaagcagtgcacatttcatagtttcaaatctgtaatcagcaataaaaatcctaaaatatgtacctaaaaaaaaaaaaaaaaaaaa

SEQ ID NO: 765 - DNA, 60 bp, Homo sapiens
aaggtatctggaaatgtagagaaaaagatctgtgcggttggcataaccaacttactaaca

SEQ ID NO: 766 - DNA, 3067 bp, Homo sapiens
ggtgggtttatctcaaggcctgagtagccggtaacaaacgagggttcccgggattggaccgacgcaccatgcctctgcgacttgatatcaaaagaaagctaactgctagatctgatcgagttaagagtgtggatctgcatcctacagagccatggatgttggcaagtctttacaatggcagtgtgtgtgtttggaatcatgaaacacagacactggtgaagacatttgaagtatgtgatcttcctgttcgagctgcaaagtttgttgcaaggaagaattgggttgtgacaggagcggatgacatgcagattagagtgttcaattacaatactctggagagagttcatatgtttgaagcacactcagactacattcgctgtattgctgttcatccaacccagcctttcattctaactagcagtgatgacatgcttattaagctctgggactgggataaaaaatggtcttgctcacaagtgtttgaaggacacacccattatgttatgcagattgtgatcaaccccaaagataacaatcagtttgccagtgcctctttggacaggactatcaaggtgtggcagttgggctcttcgtcaccaaacttcactttggaaggacatgagaaaggcgtgaattgcattgattactacagtggtggggacaagccatacctcatttcaggtgcagatgaccgtcttgttaaaatatgggattatcagaataaaacatgtgtgcagacactggaaggacatgcccaaaatgtgtcttgtgccagctttcatcctgagttgccaatcattatcacaggttcagaagatggaacagtacgtatttggcattcaagcacctaccggcttgagagcacactgaattatggaatggagagggtatggtgcgtggccagtctaagagggtcaaacaatgtcgctttgggctatgatgaagggagcatcattgttaagcttggtcgggaggaacctgccatgtccatggatgccaatggaaagataatttgggccaagcattcagaagtccagcaggccaacctaaaagcaatgggagatgctgaaattaaagatggtgaaagattgccactggcagtaaaggatatgggcagttgtgaaatataccctcagactattcagcacaatcctaatgggcggtttgtggtggtgtgtggtgatggggagtatatcatctacacagcaatggcattgagaaacaagagctttggatctgctcaggagtttgcatgggcccacgattcttcagagtatgcaataagagagagcaacagcattgtaaagatatttaagaactttaaggaaaaaaaatcatttaaaccagattttggagcagaaagtatctacggcggcttcttattgggagtcagatctgtaaatggcttagccttctatgactgggacaatacagaactcatacgaagaattgaaattcagcccaaacatattttctggtctgactctggagagctagtctgtattgctactgaggaatcattttttatccttaagtatctgtcagaaaaagtcttggctgcacaggaaacacatgagggagttactgaagatggcattgaagatgcctttgaggttcttggtgagattcaggaaattgtgaaaacagggctttgggtaggcgattgcttcatttacacaagttctgtgaacagattaaattattatgttggaggagaaatagtcaccattgcccacttggacaggacgatgtatctcctaggctacattcctaaagacaacaggctttatctgggggataaagaattgaacatcattagctattccctgctggtttcagtcctggaataccagacagctgtcatgcggagggactttagcatggctgataaggtccttcctaccattccaaaagaacagaggaccagagttgcacactttttggaaaagcagggcttcaagcagcaagctcttacagtatccacagatcctgagcatcgttttgagcttgctcttcagcttggagagttaaaaattgcataccagttagcagtggaagcagagtcagaacagaagtggaaacaacttgctgaacttgccattagtaaatgtcagtttggcctagcccaggagtgcctgcatcatgcacaggattatgggggcctgctgcttttggccactgcctctggaaatgctaatatggtgaacaagctagcagagggtgcggagagagatggcaaaaataatgtggcattcatgagctactttttacagggcaaggttgatgcctgcctagagctcttaattagaactggacggctgccagaagctgccttcttggcccgaacttacttacccagtcaggtttcaagggtagtgaaactctggagagagaatctctcaaaagtcaatcagaaagcagcagaatcccttgctgacccaacagagtatgaaaacctgttccctggattaaaagaagcctttgttgttgaagaatgggtgaaggaaacacatgctgatctgtggccagccaaacaatacccacttgtcacgccaaatgaagagagaaatgtcatggaagagggaaaagactttcagccctcaagatctacagctcaacaggaacttgatgggaaacctgcttctcctactccggttattgtggcctcccacacagccaacaaagaagaaaagagtttactcgaactagaagtagatttggataatttggaattagaagatattgacacaacagatatcaatctggatgaagatattttggatgattgactgtaatgctttccatttacctgactaaacagatcattattatatataggtattgattgctaccctgaccacagtgctttggactatgagaaacttcttagatttttatatgtaaatgctgtggaccactgggagcacaatgcccacatcatcttaagaagagtttatgtgcagcatttaaatcactgtgttttccttgttaactaaaacagacatgggctttgatttttttcatactattagaccatatctcataaaaccttttgaattaaaaaaaa

SEQ ID NO: 767 - DNA, 60 bp, Homo sapiens
ctggatgaagatattttggatgattgactgtaatgctttccatttacctgactaaacaga

SEQ ID NO: 768 - DNA, 1705 bp, Homo sapiens
gggcggcggcgcgcgggtgcgatcgcggagctgtgaggcgcaggcagggctctggggcacctagagaccggggccggagacgtggcagccgccctgcccgccagaaagtttcctagaagtttgctgggcgcgggcgcacgactgactggctggaccatgaacgtgttccgaatcctcggcgacctgagccacctcctggccatgatcttgctgctggggaagatctggaggtccaagtgctgcaagggcatctctgggaagagccagatcctgtttgctctcgtcttcaccaccaggtacctggacctgttcaccaacttcatctccatctacaacacagtaatgaaggtggtttttctcctctgtgcctatgttacagtgtacatgatatatgggaaattccgtaaaacttttgacagtgagaatgacacattccgcctggagtttcttctggtcccagtcattggcctttccttccttgaaaactacagtttcactctgctggagatcctctggactttctctatctatctggaatcagtggctatcctgccccagctcttcatgatcagcaagactggagaggctgagaccataactactcactacctgttctttctgggtctgtaccgggcactctacctggctaactggatcaggcggtaccagactgagaatttctatgaccaaattgcagtcgtgtctggagtagtacaaaccatcttctactgtgacttcttctacttgtatgtgaccaaagtccttaagggaaagaagttaagtcttccaatgccaatctgaggaccttcagagacagtctacgccttaacaagcacatgaaggaaactattttgaatgttctctttggcaacttatccataatttgggatcaaatgttaaaaccagaaaagtgtttagtgtggatttcagcaaaacctgatcatcccacccagaagaccttctcatcaatagatcgcccttaaagacccattgtaaggtcataaaaaacctcggccacctgcacaaagatggtgcctcactgcaacaagaaaccttaaggtgtcttaccgacgaaataaaaaacataaatgattgttctccaaggcctgagggcaagactcatgatgagcaagtcaaccccaatctggaacaatgtccctcctcttagaatgtcccaactaaagaccagttaaaatattagggtacgttcttgtgaatttccactttccaggtagatgaccaaatttaggtggtcaagatataaaggtgtcagctagttttaagtgtgaaacttatttcactttcacactgccttcaggccagaagcaaaccaaatttaccaggtttggctggaggagttttgtgactcatcttttactggtttgaattttttcaaaccagtggctgatacctgccttgtacttagtaccttaataccaataacctaatggtacttaggcgagtaccatttgcacaatcactgttttacttatgagcagatacagatatatccaaacccttacctactaggtatcctgctagggttttcaattccaattcttgtattaagttttttcctttcagttttaggtgcgaaagtaatcagtcaatccaatatcccccatctttgtcttgaaacaaaaactgttttaagacgtctacgttgaattattcagagaattaagcaataaaagctcacacctta

SEQ ID NO: 769 - DNA, 60 bp, Homo sapiens
gccttgtacttagtaccttaataccaataacctaatggtacttaggcgagtaccatttgc

SEQ ID NO: 770 - DNA, 486 bp, Homo sapiens
acaactctaagcgtagttcaaagacatttaaattgacaagttaccagttaaagaatttagaatatattagatcccatctagtattatatattttttctagttgatcattgagcagtaaataccaaatactcgattagaaggtaatttttacattgttttgaaagggtgaaacaatttatctcctctggtattattcttaaaccacagatagggatagtagggtagtgaaacgaataaatacctggtagaagacaagagacttgggctctacacctggctctgccactgatttgctaagtcatattggcaatcaccacacccttcagggaattagtttcatctgtaaaatgcagcggttagtactataaaatcatacaaatttctttgtgctttgagaatctataaaggaatgtctgttgatattctgagtcgattttcatttgcttttgttccagaacggttaaaataaagcatattatttcattt

SEQ ID NO: 771 - DNA, 60 bp, Homo sapiens
aagaatttagaatatattagatcccatctagtattatatattttttctagttgatcattg

SEQ ID NO: 772 - DNA, 2707 bp, Homo sapiens
ctacgcgcggggcgggtgctgcttgctgcaggctctggggagtcgccatgcctacaacacagcagtcccctcaggatgagcaggaaaagctcttggatgaagccatacaggctgtgaaggtccagtcattccaaatgaagagatgcctggacaaaaacaagcttatggatgctctaaaacatgcttctaatatgcttggtgaactccggacttctatgttatcaccaaagagttactatgaactttatatggccatttctgatgaactgcactacttggaggtctacctgacagatgagtttgctaaaggaaggaaagtggcagatctctacgaacttgtacagtatgctggaaacattatcccaaggctttaccttttgatcacagttggagttgtatatgtcaagtcatttcctcagtccaggaaggatattttgaaagatttggtagaaatgtgccgtggtgtgcaacatcccttgaggggtctgtttcttcgaaattaccttcttcagtgtaccagaaatatcttacctgatgaaggagagccaacagatgaagaaacaactggtgacatcagtgattccatggattttgtactgctcaactttgcagaaatgaacaagctctgggtgcgaatgcagcatcagggacatagccgagatagagaaaaaagagaacgagaaagacaagaactgagaattttagtgggaacaaatttggtgcgcctcagtcagttggaaggtgtaaatgtggaacgttacaaacagattgttttgactggcatattggagcaagttgtaaactgtagggatgctttggctcaagaatatctcatggagtgtattattcaggttttccctgatgaatttcacctccagactttgaatccttttcttcgggcctgtgctgagttacaccagaatgtaaatgtgaagaacataatcattgctttaattgatagattagctttatttgctcaccgtgaagatggacctggaatcccagcggatattaaactttttgatatattttcacagcaggtggctacagtgatacagtctagacaagacatgccttcagaggatgttgtatctttacaagtctctctgattaatcttgccatgaaatgttaccctgatcgtgtggactatgttgataaagttctagaaacaacagtggagatattcaataagctcaaccttgaacatattgctaccagtagtgcagtttcaaaggaactcaccagacttttgaaaataccagttgacacttacaacaatattttaacagtcttgaaattaaaacattttcacccactctttgagtactttgactacgagtccagaaagagcatgagttgttatgtgcttagtaatgttctggattataacacagaaattgtctctcaagaccaggtggattccataatgaatttggtatccacgttgattcaagatcagccagatcaacctgtagaagaccctgatccagaagattttgctgatgagcagagccttgtgggccgcttcattcatctgctgcgctctgaggaccctgaccagcagtacttgattttgaacacagcacgaaaacattttggagctggtggaaatcagcggattcgcttcacactgccacctttggtatttgcagcttaccagctggcttttcgatataaagagaattctaaagtggatgacaaatgggaaaagaaatgccagaagattttttcatttgcccaccagactatcagtgctttgatcaaagcagagctggcagaattgcccttaagactttttcttcaaggagcactagctgctggggaaattggttttgaaaatcatgagacagtcgcatatgaattcatgtcccaggcattttctctgtatgaagatgaaatcagcgattccaaagcacagctagctgccatcaccttgatcattggcacttttgaaaggatgaagtgcttcagtgaagagaatcatgaacctctgaggactcagtgtgcccttgctgcatccaaacttctaaagaaacctgatcagggccgagctgtgagcacctgtgcacatctcttctggtctggcagaaacacggacaaaaatggggaggagcttcacggaggcaagagggtaatggagtgcctaaaaaaagctctaaaaatagcaaatcagtgcatggacccctctctacaagtgcagctttttatagaaattctgaacagatatatctatttttatgaaaaggaaaatgatgcggtaacaattcaggttttaaaccagcttatccaaaagattcgagaagacctcccgaatcttgaatccagtgaagaaacagagcagattaacaaacattttcataacacactggagcatttgcgcttgcggcgggaatcaccagaatccgaggggccaatttatgaaggtctcatcctttaaaaaggaaatagctcaccatactcctttccatgtacatccagtgagggttttattacgctaggtttcccttccatagattgtgcctttcagaaatgctgaggtaggtttcccatttcttacctgtgatgtgttttacccagcacctccggacactcaccttcaggaccttaataaaattattcacttggtaagtgttcaagtctttctgatcaccccaagtagcatgactgatctgcaatttaaaattcctgtgatctgtaaaaaaaaaa

SEQ ID NO: 773 - DNA, 60 bp, Homo sapiens
ggttttaaaccagcttatccaaaagattcgagaagacctcccgaatcttgaatccagtga

SEQ ID NO: 774 - DNA, 3769 bp, Homo sapiens
aaagctgcagcgtctggaaaaaagcgacttgtggcggtcgagcgtggcgcaggcgaatcctcggcactaagcaaatatggacctcgcggcggcagcggagccgggcgccggcagccagcacctggaggtccgcgacgaggtggccgagaagtgccagaaactgttcctggacttcttggaggagtttcagagcagcgatggagaaattaaatacttgcaattagcagaggaactgattcgtcctgagagaaacacattggttgtgagttttgtggacctggaacaatttaaccagcaactttccaccaccattcaagaggagttctatagagtttacccttacctgtgtcgggccttgaaaacattcgtcaaagaccgtaaagagatccctcttgccaaggatttttatgttgcattccaagacctgcctaccagacacaagattcgagagctcacctcatccagaattggtttgctcactcgcatcagtgggcaggtggtgcggactcacccagttcacccagagcttgtgagcggaacttttctgtgcttggactgtcagacagtgatcagggatgtagaacagcagttcaaatacacacagccaaacatctgccgaaatccagtttgtgccaacaggaggagattcttactggatacaaataaatcaagatttgttgattttcaaaaggttcgtattcaagagacccaagctgagcttcctcgagggagtatcccccgcagtttagaagtaattttaagggctgaagctgtggaatcagctcaagctggtgacaagtgtgactttacagggacactgattgttgtgcctgacgtctccaagcttagcacaccaggagcacgtgcagaaactaattcccgtgtcagtggtgttgatggatatgagacagaaggcattcgaggactccgggcccttggtgttagggacctttcttataggctggtctttcttgcctgctgtgttgcgccaaccaacccaaggtttggggggaaagagctcagagatgaggaacagacagctgagagcattaagaaccaaatgactgtgaaagaatgggagaaagtgtttgagatgagtcaagataaaaatctataccacaatctttgtaccagcctgttccctactatacatggcaatgatgaagtaaaacggggtgtcctgctgatgctctttggtggcgttccaaagacaacaggagaagggacctctcttcgaggggacataaatgtttgcattgttggtgacccaagtacagctaagagccaatttctcaagcacgtggaggagttcagccccagagctgtctacaccagtggtaaagcgtccagtgctgctggcttaacagcagctgttgtgagagatgaagaatctcatgagtttgtcattgaggctggagctttgatgttggctgataatggtgtgtgttgtattgatgaatttgataagatggacgtgcgggatcaagttgctattcatgaagctatggaacagcagaccatatccatcactaaagcaggagtgaaggctactctgaacgcccggacgtccattttggcagcagcaaacccaatcagtggacactatgacagatcaaaatcattgaaacagaatataaatttgtcagctcccatcatgtcccgattcgatctcttctttatccttgtggatgaatgtaatgaggttacagattatgccattgccaggcgcatagtagatttgcattcaagaattgaggaatcaattgatcgtgtctattccctcgatgatatcagaagatatcttctctttgcaagacagtttaaacccaagatttccaaagagtcagaggacttcattgtggagcaatataaacatctccgccagagagatggttctggagtgaccaagtcttcatggaggattacagtgcgacagcttgagagcatgattcgtctctctgaagctatggctcggatgcactgctgtgatgaggtccaacctaaacatgtgaaggaagctttccggttactgaataaatcaatcatccgtgtggaaacacctgatgtcaatctagatcaagaggaagagatccagatggaggtagatgagggtgctggtggcatcaatggtcatgctgacagccctgctcctgtgaacgggatcaatggctacaatgaagacataaatcaagagtctgctcccaaagcctccttaaggctgggcttctctgagtactgccgaatctctaaccttattgtgcttcacctcagaaaggtggaagaagaagaggacgagtcagcattaaagaggagcgagcttgttaactggtacttgaaggaaatcgaatcagagatagactctgaagaagaacttataaataaaaaaagaatcatagagaaagttattcatcgactcacacactatgatcatgttctaattgagctcacccaggctggattgaaaggctccacagagggaagtgagagctatgaagaagatccctacttggtagttaaccctaactacttgctcgaagattgagatagtgaaagtaactgaccagagctgaggaactgtggcacagcacctcgtggcctggagcctggctggagctctgctagggacagaagtgtttctggaagtgatgcttccaggatttgttttcagaaacaagaattgagttgatggtcctatgtgtcacattcatcacaggtttcataccaacacaggcttcagcacttcctttggtgtgtttcctgtcccagtgaagttggaaccaaataatgtgtagtctctataaccaatacctttgttttcatgtgtaagaaaaggcccattacttttaaggtatgtgctgtcctattgagcaaataactttttttcaattgccagctactgcttttattcatcaaaataaaataacttgttctgaagttgtctattggatttctttctactgtaccctgattattacttccatctacttctgaatgtgagactttccctttttgcttaacctggagtgaagaggtagaactgtggtattatggatgaggtttctatgagaaggagtcattagagaactcatatgaaagctagaggccttagagatgactttccaaggttaattccagttgtttttttttttttttaagtttataaaagtttattatacttttttaaaattactctttagtaatttattttacttctgtgtcctaagggtaatttctcaggattgttttcaaattgcttttttaggggaaataggtcatttgctatattacaagcaatccccaaattttatggtcttccaggaaaagttattaccgtttatgatactaacagttcctgagacttagctatgatcagtatgttcatgaggtggagcagttcctgtgttgcagcttttaacaacagatggcattcattaaatcacaaagtatgttaaaggtcacaaaagcaaaataactgtctgaggctaaggcccacgtgggacagtctaatacccatgagtactcaacttgccttgatgtctgagctttccagtgcaatgtgaatttgagcagccagaaatctattagtagaaagcaagacagattaatataggttaaaacaatgatttaaatatgtttctcccaataattatctctttccctggaatcaacttgtatgaaaccttgtcaaaatgtactccacaagtatgtacaattaagtattttaaaaataaatggcaaacattaaaaacaaaaaaaaaaaaaaaaaaaa

SEQ ID NO: 775 - DNA, 60 bp, Homo sapiens
ttggtagttaaccctaactacttgctcgaagattgagatagtgaaagtaactgaccagag

SEQ ID NO: 776 - DNA, 1914 bp, Homo sapiens
cggacgcgtgggcggacgcgtggggccttcctgggattggagtctcgagctttcttcgttcgttcgccggcgggttcgcgcccttctcgcgcctcggggctgcgaggctggggaaggggttggagggggctgttgatcgccgcgtttaagttgcgctcggggcggccatgtcggccggcgaggtcgagcgcctagtgtcggagctgagcggcgggaccggaggggatgaggaggaagagtggctctatggcgatgaaaatgaagttgaaaggccagaagaagaaaatgccagtgctaatcctccatctggaattgaagatgaaactgctgaaaatggtgtaccaaaaccgaaagtgactgagaccgaagatgatagtgatagtgacagcgatgatgatgaagatgatgttcatgtcactataggagacattaaaacgggagcaccacagtatgggagttatggtacagcacctgtaaatcttaacatcaagacagggggaagagtttatggaactacagggacaaaagtcaaaggagtagaccttgatgcacctggaagcattaatggagttccactcttagaggtagatttggattcttttgaagataaaccatggcgtaaacctggtgctgatctttctgattattttaattatgggtttaatgaagatacctggaaagcttactgtgaaaaacaaaagaggatacgaatgggacttgaagttataccagtaacctctactacaaataaaattacggtacagcagggaagaactggaaactcagagaaagaaactgcccttccatctacaaaagctgagtttacttctcctccttctttgttcaagactgggcttccaccgagcaggagattacctggggcaattgatgttatcggtcagactataactatcagccgagtagaaggcaggcgacgggcaaatgagaacagcaacatacaggtcctttctgaaagatctgctactgaagtagacaacaattttagcaaaccacctccgtttttccctccaggagctcctcccactcaccttccacctcctccatttcttccacctcctccgactgtcagcactgctccacctctgattccaccaccgggttttcctcctccaccaggcgctccacctccatctcttataccaacaatagaaagtggacattcctctggttatgatagtcgttctgcacgtgcatttccatatggcaatgttgcctttccccatcttcctggttctgctccttcgtggcctagtcttgtggacaccagcaagcagtgggactattatgccagaagagagaaagaccgagatagagagagagacagagacagagagcgagaccgtgatcgggacagagaaagagaacgcaccagagagagagagagggagcgtgatcacagtcctacaccaagtgttttcaacagcgatgaagaacgatacagatacagggaatatgcagaaagaggttatgagcgtcacagagcaagtcgagaaaaagaagaacgacatagagaaagacgacacagggagaaagaggaaaccagacataagtcttctcgaagtaatagtagacgtcgccatgaaagtgaagaaggagatagtcacaggagacacaaacacaaaaaatctaaaagaagcaaagaaggaaaagaagcgggcagtgagcctgcccctgaacaggagagcaccgaagctacacctgcagaataggcatggttttggccttttgtgtatattagtaccagaagtagatactataaatcttgttatttttctggataatgtttaagaaatttaccttaaatcttgttctgtttgttagtatgaaaagttaactttttttccaaaataaaagagtgaatttttcatgttaagttaaaaaaaaaaaaaaaaa

SEQ ID NO: 777 - DNA, 60 bp, Homo sapiens
tgtaatgctgaaattcaactctaaccagttctgaatctatcgtcatacatacacatcatc

SEQ ID NO: 778 - DNA, 1535 bp, Homo sapiens
gaggtggtaaccgtgatagtagcagctccggcggcagcaacagcgactacgagggatggcggcggctgcagcaggaactgcaacatcccagaggtttttccagagcttctcggatgccctaatcgacgaggacccccaggcggcgttagaggagctgactaaggctttggaacagaaaccagatgatgcacagtattattgtcaaagagcttattgtcacattcttcttgggaattactgtgttgctgttgctgatgcaaagaagtctctagaactcaatccaaataattccactgctatgctgagaaaaggaatatgtgaataccatgaaaaaaactatgctgctgccctagaaacttttacagaaggacaaaaattagatagtgcagatgctaatttcagtgtctggattaaaaggtgtcaagaagctcagaatggctcagaatctgaggtgtggactcatcagtcaaaaatcaagtatgactggtatcaaacagaatctcaagtagtcattacacttatgatcaagaatgttcagaagaatgatgtaaatgtggaattttcagaaaaagagttgtctgctttggttaaacttccttctggagaggattacaatttgaaactggaacttcttcatcctataataccagaacagagcacgtttaaagtactttcaacaaagattgaaattaaactgaaaaagccagaggctgtgagatgggaaaagctagaggggcaaggagatgtgcctacgccaaaacaattcgtagcagatgtaaagaacctatatccatcatcatctccttatacaagaaattgggataaattggttggtgagatcaaagaagaagaaaagaatgaaaagttggagggagatgcagctttaaacagattatttcagcagatctattcagatggttctgatgaagtgaaacgtgccatgaacaaatcctttatggagtcgggtggtacagttttgagtaccaactggtctgatgtaggtaaaaggaaagttgaaatcaatcctcctgatgatatggaatggaaaaagtactaaataaattaatttgctctcatcgtattgtgtatattcacctaatgcccattgtgtattgatattgcattcttgaattttgaacactgaatatctttttgaaagattatacttctttacctctttgtgctttagaaattattttccttcaagtgttcaagtctaatgaagaatgaagataacattttatcacttctgtccttaaagatttcagacatggtgaaactgaataaagcatgtcatttgctcctagatagattcattctatctagttgtggggatggagaaatctttaatggtatattttcggttattgccttatttttgatacagtattctgtcagtaatttattagacctggcagctttgggtgagcttagatttttcaccttcagtgttacattgtgtttgcttttaaaaactgcttttgaatggagttgtaaatacaatttttctatgaagatgtaaaaaaaaaaaaaaa

SEQ ID NO: 779 - DNA, 60 bp, Homo sapiens
taaaacctgtagtgagttcttcagtcagtcaacactaaacctgttttgtaaatttgatgc

SEQ ID NO: 780 - DNA, 1438 bp, Homo sapiens
cggtaactaccccggctgcgcacagctcggcgctccttcccgctccctcacacaccgcctcagcccgcaccggcagtagaagatggtgaaagaaacaacttactacgatgttttgggggtcaaacccaatgctactcaggaagaattgaaaaaggcttataggaaactggccttgaagtaccatcctgataagaacccaaatgaaggagagaagtttaaacagatttctcaagcttacgaagttctctctgatgcaaagaaaagggaattatatgacaaaggaggagaacaggcaattaaagagggtggagcaggtggcggttttggctcccccatggacatctttgatatgttttttggaggaggaggaaggatgcagagagaaaggagaggtaaaaatgttgtacatcagctctcagtaaccctagaagacttatataatggtgcaacaagaaaactggctctgcaaaagaatgtgatttgtgacaaatgtgaaggtagaggaggtaagaaaggagcagtagagtgctgtcccaattgccgaggtactggaatgcaaataagaattcatcagataggacctggaatggttcagcaaattcagtctgtgtgcatggagtgccagggccatggggagcggatcagtcctaaagatagatgtaaaagctgcaacggaaggaagatagttcgagagaagaaaattttagaagttcatattgacaaaggcatgaaagatggccagaagataacattccatggtgaaggagaccaagaaccaggactggagccaggcgatattatcattgtgttagatcagaaggaccatgctgtttttactcgacgaggagaagaccttttcatgtgtatggacatacagctcgttgaagcactgtgtggcttccagaagccaatatctactcttgacaaccgaaccatcgtcatcacctctcatccaggtcagattgtcaagcatggagatatcaagtgtgtactaaatgaaggcatgccaatttatcgtagaccatatgaaaagggtcgcctaatcatcgaatttaaggtaaactttcctgagaatggctttctctctcctgataaactgtctttgctggaaaaactcctacccgagaggaaggaagtggaagagactgatgagatggaccaagtagaactggtggactttgatccaaatcaggaaagacggcgccactacaatggagaagcatatgaggatgatgaacatcatcccagaggtggtgttcagtgtcagacctcttaatggccagtgaataacactcactgctggcatttaatgtgcagtagtgaatgagtgaaggactgtaatcataatatgctcactacttgctcttgtttttgttttaataaactatagtagtgttataaaaagttaaatgaagaataaacgcaaatataaaagctc

SEQ ID NO: 781 - DNA, 60 bp, Homo sapiens
tttatcgtagaccatatgaaaagggtcgcctaatcatcgaatttaaggtaaactttcctg

SEQ ID NO: 782 - DNA, 2666 bp, Homo sapiens
ttatttattgccctcttcagagagtagatgtagaaaataaagagaggaaacctagattacttaattttattttaacattttctatagatagcataccacgccaagtgtgctctgtcttgatccccttccttctaacatctgccagacattgtagagtttcgcaagcagttgtaggtttgagctgcagccagtcatttcttttattctttaaaagtacatagatttgtctttttagggctttactgaaagtaaaatatcctgacatttaaactgacagatgtaggaggtaaaaaatagagttctgaaacatttgaatttatgtgacagctgaagtcacgagatgagggatgtatgtcccccagggaggatgcagaaagaagaaaagggtactggaaacagcatgtcagtggtgccagctgagggctggaggcagccaggagagttgggagcctgggtgctgggtggagagaggttaacagggaagacatgggaagtattgtgaaggctggtgtgagcaggggactactccagccctgttggaacatagagccatttggcagattgacaatgcagtgacagctgtatataataaatgtgttgaaaggaggaaggtgaggattttcttggtgggagtttatgctgttatttaacatattttgcttccaaaggggttaagatgttttacctaaatggaggtttctaggtcagtgctatacaatatttctaatctgtgttttatagtgtgagctacatatgtaattttaaaattttcaagtagccacataataaaggaaacaggtgaaatttaatgacatatttcctttaatacggtatatccaaaatattattatgtcaacctataatcagtataaaaacctgttactgaaatattttatagggcccatctcagttcagactagccacatttaagtgcttcatagccacatgtggctcatggccatccatatttggacaatgtactttagactattgcatctgtatactcttgtgccgtcagctggggggtggggtgtgtgtgcgtgtataccaaggcagtgagcatctgagctttgaacctcaaagaccaaaatgccctgcccattttcctgcttatcagctgaggaatctttacccacattgacacatgggcttgttctgacccaagtgcatgcaggcttccagagcagattcagaggcctaacttagtcctttagctttcctcccagcacagaactcccaaggttatctgcaagtaggccttgcctagagagactgagttttcaagttgtcagttttcccaaattgtcctcaagcatcttcctctggaatcaccttactgtttagtaaacattcagaggacttgctacacatctgggcagtctgcattgtaattcatatgtgtttacacatttgtgtcttcatctgctaaagcacctttgaaccatattgtaattcataatatctgaagcaattattatgaattgtagtaattcataatattgaagcgattcataatatctgaagcaatccccagatacgggttaggcatggccctgctctgagcaggatggcaaaagtggcagtccgtgacgcagcccttgttaccccaggctattactaaatggtggtggtggttttatcttaattaaaatgacatcaccaacaatgggccctttcctgtctgccaggaaaagttttctgtagtgacgcacgtgttgtgtgtgtatgtgtgcgtttgaggctatattactcattgctacggcagttcaaaatgacttggaaaaaaacaatgaacgctggtcattgatatgtatactgacatgtttaagggaagttactgtggtctgtaacttatgaaatacataaaaaatatgatgggtggagtgacggacacatggacagatatgaagcaagcactgtaaaatattagtggtagtttttgtatgcccatactcacggcaccattattcacagtagctaagagatggaagcaatatgtgcccatcagtgggtgaatgatcaacaaaatgtggtatattcatacagtggaatattattcagcctctaaaaggaagatacgctgacatgtgctgcaacatggatgaatcttgaggacatgatgctaagtgaagtaagccagtcactggaagacaaatactctatgcttccatttatgtgaagtatctagagcagtcaaatgcatagaaacaagtagaatggtagttgccaaggactgggggaggaggaaatgaggagttgtttaatgggtatagtgtttcagttttgcaagataaaaagtcctgtggattggttgcacagttaagttatgtgaatgctgtatgccaactcaactgtacactctaaaatggttaagatggtaaatcttatctttattttaccacagttttttttaaagcatggtaaacaccatttcccaggatgtaaatcggtactaaaaaaaagtgctccaaagtaagatatatttgggaaacacagggataactaaggttagataggtgctctttattgcaggaattctaagagcatttaacaaattaatttacactgggaattttcagtgtggagggtctggctcatagcatttcacaaacattatacttcagagtcccaaagcctttaaataaaatgttaatggtagaaactcc

SEQ ID NO: 783 - DNA, 60 bp, Homo sapiens
ctggctcatagcatttcacaaacattatacttcagagtcccaaagcctttaaataaaatg

SEQ ID NO: 784 - DNA, 4229 bp, Homo sapiens
ccagtggacgagaatcgcggagcctgcggggctggaggttgagcgcccgggccagcacctaggcgggcgcgggggtgtgcaggccagggttcgcgcgggccgggtggaggcttgagcggggacccccgagcttgagccccggagccggcggcgctggggccagaggggccggacgggaggtggcggaggtggcggcggaggcgaaggggcggcgggacgcgggcctggcccgtgtgtgtcctggcggcctggcccaggctgccgctgtacggtgagcccgagggaggcggatctgggtcccgggaaggacacccgcctggatttgccccttaggcccggcccgggcccctcgggagcagaacaaccttagtgaggtggacaggaggggacctcgcgagcagacgcgcgccagcgacagcagccccgccccggcctctcgggagccgtggggcagaggctgcggagccccagaagggtctaccagccacagtctctgcacgtttccaagagcagcagaaaatgaacacattgcaggggccagtgtcattcaaagatgtggctgtggatttcacccaggaggagtggcagcagctggaccctgatgagaagataacttacagggatgtgatgttggagaactatagccatctagtttctgtgggatatgataccaccaagccaaacgtcatcattaagttggagcagggagaggagccgtggataatgggaggtgaatttccatgtcaacatagtccagaagcctggagagttgatgacctgatagagagaatccaagaaaacgaagacaaacattcaaggcaagctgcttgtatcaatagcaaaaccctgactgaagagaaagagaatacatttagtcaaatttacatggaaacaagccttgttccttcaagcataatagctcataattgtgtctcatgtggaaagaatttagaatctatttcgcaattaattagtagtgatggaagctatgctaggacaaaacctgatgagtgtaatgaatgtgggaaaacatatcatggagagaaaatgtgtgaatttaatcaaaatggggatacctattctcacaatgaagaaaatattcttcagaaaattagtattttggagaaaccctttgaatataatgaatgcatggaagccttagacaatgaggctgtttttattgctcataagagagcttacataggggagaagccctatgagtggaatgattctggaccagacttcatacagatgtcaaattttaatgcatatcagagatcacaaatggaaatgaagccctttgaatgcagtgaatgtggaaaatccttctgtaaaaagtcaaaattcatcatccaccagagggctcacacaggagagaaaccttatgaatgtaatgtatgtgggaaatccttcagccaaaagggaaccctcactgtacatcggagatcacacttagaggagaagccctataaatgtaatgaatgtgggaaaaccttttgtcagaagttacacctcactcaacacctaagaactcattcaggagagaaaccctacgaatgtagcgaatgtgggaaaaccttctgccaaaagacacatctcaccctgcaccagaggaatcattcaggagagaggccctatccatgtaacgaatgtgggaaatccttctcccgcaagtctgctctcagtgaccatcagagaactcacacgggagagaagctttataaatgtaatgaatgtgggaaatcctactaccgaaagtctactctgattacacatcagagaacacacacgggagagaagccctatcagtgtagcgagtgtgggaaattcttttctcgggtgtcatacctcactatacattatagaagtcatttagaagagaaaccctatgaatgtaatgaatgtggcaaaaccttcaatttaaattcagccttcattagacatcggaaagtacacacagaagagaaatcccatgaatgtagtgaatgtggaaagttctctcagttgtatctcaccgaccatcatacagctcatttagaagagaaaccctatgaatgtaatgaatgtgggaaaaccttccttgtaaattcagccttcgatgggcaccagccacttccaaaaggggagaaatcctatgaatgtaatgtatgtggaaagttattcaatgagttgtcatactatactgaacattatagaagtcattcagaagagaaaccttatggatgtagcgaatgtgggaaaaccttttcccataattcatccctcttcagacatcaaagagtacacacaggcgagaaaccctatgaatgttacgaatgtggaaaattcttctctcagaaatcatatctcactatacatcatcgaattcattcaggagagaaaccctatgaatgtagtaaatgtggaaaagtcttctctcggatgtcaaacctcactgtccactacagaagccattcaggagagaaaccctatgaatgtaatgaatgtgggaaagtcttttctcagaagtcatacctcactgtacactatagaactcattcaggagagaaaccctatgaatgtaacgagtgtgggaaaaaattccaccacagatcagccttcaatagccatcagagaattcatagaagaggaaatatgaacgtacttgatgtggaaaatctctgaagtcagatctcaatttttagaaaactctctgaatataatgaatatggggaatccaataggaagtcaaagcgtttatctgagagttcgtgttcctgaacggtgagaagcatttaggcattagagtcattttaatccaaattttcacagagaagaatcccgaagaatgtaacaagaagcaaagccttcagcaagatcatacgactcatcggacactaatttatataggagtgaagttttataaatatttaatatttattttggattcaaattgtatttacatatcagggaatcatacaaaggcaaaatctgtcaatatggtgaatgtggaaaatatattgtcttggaaatttgttgtaaaagccatatttctaatggaaaatcaggtgtttacaggaaagatctcagaggctatgagctctgaataaatcttcattgtataaaatgaagtttttaaattgtcaggagttgatcatgaggacagtagcattaaataagtatatggccgttttttatcatgtcttaaaaatgcaatctaatggtaattctatgcaagtttggaattggatgacttgtgaagaggcagttttcttatttgagtattaggatggcaaaatgtattaagacaggacatattgttggtgagataatatttaataggtataaaatggtaaaatacctagttttctatttagaggaatttacaaatgggtttttaacaaatgcctcattagtacaggaggcagtcgttttgtaaagttttcaactgcatctgagtaagataagattttctaaaagactattttgataaactatacatacataatttggaattgtttaagtctatttcagtgaaagagaacaagcatactgcccatactctaaaatatccccagctctcacaccacccttgttttttaacccataggtttgagtgtgcctagtgccaatattttgtaatttagaaattttattcacaaacttctgtttggtacaaatacagtgtcattgttttgtgcattctcctttttcccagtatttcagaacaaattgattcaagtttctagcagatattttttgatcaattaacttaatgtcctcgctccatttcttgctggaacagtttaggtacctaccacttcttcacatgacacaggggaatcctgattagtcaaaataataatgatttcattctctttgccagtaacttgttttatagtggtcatatgacctgatactgggtaaacaaaacaaagatggacttgttctgggaaaaggtaaaatggtaatcaaatagattgtgttccaggaatgcaaaggtggcttaatattcacaagtcagttgctattatacaccacctgtagaaaagtaatctggcatgcagaacattcttgtggtacaattaatgttcgtttatgatcttagcaaatgatggattgaaagggacttacttaactgcataaagagacttaaactacaacaaacaatatgcttaatgatgaaatagtgaacatttctcctaagattataaaaataagacaaggatatctgctgtcaatgattttat

SEQ ID NO: 785 - DNA, 60 bp, Homo sapiens
ggcaactactaagatttcctacgctgtccttaaagcttagcataatgtatattttaagtg

SEQ ID NO: 786 - DNA, 10697 bp, Homo sapiens
cacagtggtcctccgccggctacggcgctgcgtcactggtttgcaggcgctttcctcttggaagtggcgactgctgcgggcctgagcgctggtctcacgcgcctcgggagccaggttggcggcgcgatgaggcgcagcaaggctgacgtggagcggtacatcgcctcggtgcagggctccaccccgtcgcctcgacagaagtcaatgaaaggattctattttgcaaagctgtattatgaagctaaagaatatgatcttgctaaaaaatacatatgtacttacattaatgtgcaagagagggatcccaaagctcacagatttctgggtcttctttatgaattggaagaaaacacagacaaagccgttgaatgttacaggcgttcagtggaattaaacccaacacaaaaagatcttgtgttgaagattgcagaattgctttgtaaaaatgatgttactgatggaagagcaaaatactggcttgaaagagcagccaaacttttcccaggaagtcctgcaatttataaactaaaggaacagcttctagattgtgaaggtgaagatggatggaataaactttttgacttgattcagtcagaactttatgtaagacctgatgacgtccatgtgaacatccggctagtggaggtgtatcgctcaactaaaagattgaaggatgctgtggcccactgccatgaggcagagaggaacatagctttgcgttcaagtttagaatggaattcgtgtgttgtacagacccttaaggaatatctggagtctttacagtgtttggagtctgataaaagtgactggcgagcaaccaatacagacttactgctggcctatgctaatcttatgcttcttacgctttccactagagatgtgcaggaaagtagagaattactgcaaagttttgatagtgctcttcagtctgtgaaatctttgggtggaaatgatgaactgtcagctactttcttagaaatgaaaggacatttctacatgcatgctggttctctgcttttgaagatgggtcagcatagtagtaatgttcaatggcgagctctttctgagctggctgcattgtgctatctcatagcatttcaggttccaagaccaaagattaaattaataaaaggtgaagctggacaaaatctgctggaaatgatggcctgtgaccgactgagccaatcagggcacatgttgctaaacttaagtcgtggcaagcaagattttttaaaagagattgttgaaacttttgccaacaaaagcgggcagtctgcattatatgatgctctgttttctagtcagtcacctaaggatacatcttttcttggtagcgatgatattggaaacattgatgtacgagaaccagagcttgaagatttgactagatacgatgttggtgctattcgagcacataatggtagtcttcagcaccttacttggcttggcttacagtggaattcattgcctgctttacctggaatccgaaaatggctaaaacagcttttccatcatttgccccatgaaacctcaaggcttgaaacaaatgcacctgaatcaatatgtattttagatcttgaagtatttctccttggagtagtatataccagccacttacaattaaaggagaaatgtaattctcaccacagctcctatcagccgttatgcctgccccttcctgtgtgtaaacagctttgtacagaaagacaaaaatcttggtgggatgcggtttgtactctgattcacagaaaagcagtacctggaaacgtagcaaaattgagacttctagttcagcatgaaataaacactctaagagcccaggaaaaacatggccttcaacctgctctgcttgtacattgggcagaatgccttcagaaaacgggcagcggtcttaattctttttatgatcaacgagaatacatagggagaagtgttcattattggaagaaagttttgccattgttgaagataataaaaaagaagaacagtattcctgaacctattgatcctctgtttaaacattttcatagtgtagacattcaggcatcagaaattgttgaatatgaagaagacgcacacataacttttgctatattggatgcagtaaatggaaatatagaagatgctgtgactgcttttgaatctataaaaagtgttgtttcttattggaatcttgcactgatttttcacaggaaggcagaagacattgaaaatgatgccctttctcctgaagaacaagaagaatgcaaaaattatctgagaaagaccagggactacctaataaagattatagatgacagtgattcaaatctttcagtggtcaagaaattgcctgtgcccctggagtctgtaaaagagatgcttaattcagtcatgcaggaactcgaagactatagtgaaggaggtcctctctataaaaatggttctttgcgaaatgcagattcagaaataaaacattctacaccgtctcctaccaaatattcactatcaccaagtaaaagttacaagtattctcccaaaacaccacctcgatgggcagaagatcagaattctttactgaaaatgatttgccaacaagtagaggccattaagaaagaaatgcaggagttgaaactaaatagcagtaactcagcatcccctcatcgttggcccacagagaattatggaccagactcggtgcctgatggatatcaggggtcacagacatttcatggggctccactaacagttgcaactactggcccttcagtatattatagtcagtcaccagcatataattcccagtatcttctcagaccagcagctaatgttactcccacaaagggcccagtctatggcatgaataggcttccaccccaacagcatatttatgcctatccgcaacagatgcacacaccgccagtgcaaagctcatctgcttgtatgttctctcaggagatgtatggtcctcctgcattgcgttttgagtctcctgcaacgggaattctatcgcccaggggtgatgattactttaattacaatgttcaacagacaagcacaaatccacctttgccagaaccaggatatttcacaaaacctccgattgcagctcatgcttcaagatctgcagaatctaagactatagaatttgggaaaactaattttgttcagcccatgccgggtgaaggattaaggccatctttgccaacacaagcacacacaacacagccaactccttttaaatttaactcaaatttcaaatcaaatgatggtgacttcacgttttcctcaccacaggttgtgacacagccccctcctgcagcttacagtaacagtgaaagccttttaggtctcctgacttcagataaacccttgcaaggagatggctatagtggagccaaaccaattcctggtggtcaaaccattgggcctcgaaatacattcaattttggaagcaaaaatgtgtctggaatttcatttacagaaaacatggggtcgagtcagcaaaagaattctggttttcggcgaagtgatgatatgtttactttccatggtccagggaaatcagtatttggaacacccactttagagacagcaaacaagaatcatgagacagatggaggaagtgcccatggggatgatgatgatgacggtcctcactttgagcctgtagtacctcttcctgataagattgaagtaaaaactggtgaggaagatgaagaagaattcttttgcaaccgcgcgaaattgtttcgtttcgatgtagaatccaaagaatggaaagaacgtgggattggcaatgtaaaaatactgaggcataaaacatctggtaaaattcgccttctaatgagacgagagcaagtattgaaaatctgtgcaaatcattacatcagtccagatatgaaattgacaccaaatgctggatcagacagatcttttgtatggcatgcccttgattatgcagatgagttgccaaaaccagaacaacttgctattaggttcaaaactcctgaggaagcagcactttttaaatgcaagtttgaagaagcccagagcattttaaaagccccaggaacaaatgtagccatggcgtcaaatcaggctgtcagaattgtaaaagaacccacaagtcatgataacaaggatatttgcaaatctgatgctggaaacctgaattttgaatttcaggttgcaaagaaagaagggtcttggtggcattgtaacagctgctcattaaagaatgcttcaactgctaagaaatgtgtatcatgccaaaatctaaacccaagcaataaagagctcgttggcccaccattagctgaaactgtttttactcctaaaaccagcccagagaatgttcaagatcgatttgcattggtgactccaaagaaagaaggtcactgggattgtagtatttgtttagtaagaaatgaacctactgtatctaggtgcattgcgtgtcagaatacaaaatctgctaacaaaagtggatcttcatttgttcatcaagcttcatttaaatttggccagggagatcttcctaaacctattaacagtgatttcagatctgttttttctacaaaggaaggacagtgggattgcagtgcatgtttggtacaaaatgaggggagctctacaaaatgtgctgcttgtcagaatccgagaaaacagagtctacctgctacttctattccaacacctgcctcttttaagtttggtacttcagagacaagtaaaactctaaaaagtggatttgaagacatgtttgctaagaaggaaggacagtgggattgcagttcatgcttagtgcgaaatgaagcaaatgctacaagatgtgttgcttgtcagaatccggataaaccaagtccatctacttctgttccagctcctgcctcttttaagtttggtacttcagagacaagcaaggctccaaagagcggatttgagggaatgttcactaagaaggagggacagtgggattgcagtgtgtgcttagtaagaaatgaagccagtgctaccaaatgtattgcttgtcagaatccaggtaaacaaaatcaaactacttctgcagtttcaacacctgcctcttcagagacaagcaaggctccaaagagcggatttgagggaatgttcactaagaaggagggacagtgggattgcagtgtgtgcttagtaagaaatgaagccagtgctaccaaatgtattgcttgtcagaatccaggtaaacaaaatcaaactacttctgcagtttcaacacctgcctcttcagagacaagcaaggctccaaagagcggatttgagggaatgttcactaagaaggaaggacagtgggattgcagtgtgtgcttagtaagaaatgaagccagtgctaccaaatgtattgcttgtcagtgtccaagtaaacaaaatcaaacaactgcaatttcaacacctgcctcttcggagataagcaaggctccaaagagtggatttgaaggaatgttcatcaggaaaggacagtgggattgtagtgtttgctgtgtacaaaatgagagttcttccttaaaatgtgtggcttgtgatgcctctaaaccaactcataaacctattgcagaagctccttcagctttcacactgggctcagaaatgaagttgcatgactcttctggaagtcaggtgggaacaggatttaaaagtaatttctcagaaaaagcttctaagtttggcaatacagagcaaggattcaaatttgggcatgtggatcaagaaaattcaccttcatttatgtttcagggttcttctaatacagaatttaagtcaaccaaagaaggattttccatccctgtgtctgctgatggatttaaatttggcatttcggaaccaggaaatcaagaaaagaaaagtgaaaagcctcttgaaaatggtactggcttccaggctcaggatattagtggccagaagaatggccgtggtgtgatttttggccaaacaagtagcacttttacatttgcagatcttgcaaaatcaacttcaggagaaggatttcagtttggcaaaaaagaccccaatttcaagggattttcaggtgctggagaaaaattattctcatcacaatacggtaaaatggccaataaagcaaacacttccggtgactttgagaaagatgatgatgcctataagactgaggacagcgatgacatccattttgaaccagtagttcaaatgcccgaaaaagtagaacttgtaacaggagaagaagatgaaaaagttctgtattcacagcgggtaaaactatttagatttgatgctgaggtaagtcagtggaaagaaaggggcttggggaacttaaaaattctcaaaaacgaggtcaatggcaaactaagaatgctgatgcgaagagaacaagtactaaaagtgtgtgctaatcattggataacgactacgatgaacctgaagcctctctctggatcagatagagcatggatgtggttagccagtgatttctctgatggtgatgccaaactagagcagttggcagcaaaatttaaaacaccagagctggctgaagaattcaagcagaaatttgaggaatgccagcggcttctgttagacataccacttcaaactccccataaacttgtagatactggcagagctgccaagttaatacagagagctgaagaaatgaagagtggactgaaagatttcaaaacatttttgacaaatgatcaaacaaaagtcactgaggaagaaaataagggttcaggtacaggtgcggccggtgcctcagacacaacaataaaacccaatcctgaaaacactgggcccacattagaatgggataactatgatttaagggaagatgctttggatgatagtgtcagtagtagctcagtacatgcttctccattggcaagtagccctgtgagaaaaaatcttttccgttttggtgagtcaacaacaggatttaacttcagttttaaatctgctttgagtccatctaagtctcctgccaagttgaatcagagtgggacttcagttggcactgatgaagaatctgatgttactcaagaagaagagagagatggacagtactttgaacctgttgttcctttacctgatctagttgaagtatccagtggtgaggaaaatgaacaagttgtttttagtcacagggcaaaactctacagatatgataaagatgttggtcaatggaaagaaaggggcattggtgatataaagattttacagaattatgataataagcaagttcgtatagtgatgagaagggaccaagtattaaaactttgtgccaatcacagaataactccagacatgactttgcaaaatatgaaagggacagaaagagtatggttgtggactgcatgtgattttgcagatggagaaagaaaagtagagcatttagctgttcgttttaaactacaggatgttgcagactcgtttaagaaaatttttgatgaagcaaaaacagcccaggaaaaagattctttgataacacctcatgtttctcggtcaagcactcccagagagtcaccatgtggcaaaattgctgtagctgtattagaagaaaccacaagagagaggacagatgttattcagggtgatgatgtagcagatgcaacttcagaagttgaagtgtctagcacatctgaaacaacaccaaaagcagtggtttctcctccaaagtttgtatttggttcagagtctgttaaaagcatttttagtagtgaaaaatcaaaaccatttgcattcggcaacagttcagccactgggtctttgtttggatttagttttaatgcacctttgaaaagtaacaatagtgaaactagttcagtagcccagagtggatctgaaagcaaagtggaacctaaaaaatgtgaactgtcaaagaactctgatatcgaacagtcttcagatagcaaagtcaaaaatctctttgcttcctttccaacggaagaatcttcaatcaactacacatttaaaacaccagaaaaggcaaaagagaagaaaaaacctgaagattctccctcagatgatgatgttctcattgtatatgaactaactccaaccgctgagcagaaagcccttgcaaccaaacttaaacttcctccaactttcttctgctacaagaatagaccagattatgttagtgaagaagaggaggatgatgaagatttcgaaacagctgtcaagaaacttaatggaaaactatatttggatggctcagaaaaatgtagacccttggaagaaaatacagcagataatgagaaagaatgtattattgtttgggaaaagaaaccaacagttgaagagaaggcaaaagcagatacgttaaaacttccacctacatttttttgtggagtctgtagtgatactgatgaagacaatggaaatggggaagactttcaatcagagcttcaaaaagttcaggaagctcaaaaatctcagacagaagaaataactagcacaactgacagtgtatatacaggtgggactgaagtgatggtaccttctttctgtaaatctgaagaacctgattctattaccaaatccattagttcaccatctgtttcctctgaaactatggacaaacctgtagatttgtcaactagaaaggaaattgatacagattctacaagccaaggggaaagcaagatagtttcatttggatttggaagtagcacagggctctcatttgcagacttggcttccagtaattctggagattttgcttttggttctaaagataaaaatttccaatgggcaaatactggagcagctgtgtttggaacacagtcagtcggaacccagtcagccggtaaagttggtgaagatgaagatggtagtgatgaagaagtagttcataatgaagatatccattttgaaccaatagtgtcactaccagaggtagaagtaaaatctggagaagaagatgaagaaattttgtttaaagagagagccaaactttatagatgggatcgggatgtcagtcagtggaaggagcgcggtgttggagatataaagattctttggcatacaatgaagaattattaccggatcctaatgagaagagaccaggtttttaaagtgtgtgcaaaccacgttattactaaaacaatggaattaaagcccttaaatgtttcaaataatgctttagtttggactgcctcagattatgctgatggagaagcaaaagtagaacagcttgcagtgagatttaaaactaaagaagtagctgattgtttcaagaaaacatttgaagaatgtcagcagaatttaatgaaactccagaaaggacatgtatcactggcagcagaattatcaaaggagaccaatcctgtggtgttttttgatgtttgtgcggacggtgaacctctagggcggataactatggaattattttcaaacattgttcctcggactgctgagaacttcagagcactatgcactggagagaaaggctttggtttcaagaattccatttttcacagagtaattccagattttgtttgccaaggaggagatatcaccaaacatgatggaacaggcggacagtccatttatggagacaaatttgaagatgaaaattttgatgtgaaacatactggtcctggtttactatccatggccaatcaaggccagaataccaataattctcaatttgttataacactgaagaaagcagaacatttggactttaagcatgtagtatttgggtttgttaaggatggcatggatactgtgaaaaagattgaatcatttggttctcccaaagggtctgtttgtcgaagaataactatcacagaatgtggacagatataaaatcattgttgttcatagaaaatttcatctgtataagcagttggattgaagcttagctattacaatttgatagttatgttcagcttttgaaaatggacgtttccgatttacaaatgtaaaattgcagcttatagctgttgtcactttttaatgtgttataattgaccttgcatggtgtgaaataaaagtttaaacactggtgatttcaggtgtacttgtgtttatgtactcctgacgtattaaaatggaataatactaatcttgttaaaagcaatagacctcaaactattgaaggaatatgatatatgcaatttaattttaattccttttaagatatttggacttcctgcatggatatacttaccatttgaataaagggaccacaacttggataatttaattttaggtttgaaatatatttggtaatcttaactattggtgtactcatttatgcatagagactcgtttatgaatgggtagagccacagaacgtatagagttaaccaaagtgctcttctctagaatctttacacctcctgtgtggttacaagttaactttgtaagtagcgtaccttccttccttaaaatatctagcttcctgtgccctttcatagatattcgattaatttttacattttaaacaagttgactatttcctttaggggttttgtttcaaacttttctgtcatctgtctctactacctcagaaactgcagcttggttctgatgatagaaattgaatttttccttgtagttattgtgataaagtatgaatatttttagaaagtctataccatgttctttcgttaaagatttgctttatacaagattgttgcagtacctttttctggtaaattttgtagcagaaataaaatgacaattcctaagagccaaaa

SEQ ID NO: 787 - DNA, 60 bp, Homo sapiens
aatcttaactattggtgtactcatttatgcatagagactcgtttatgaatgggtagagcc

SEQ ID NO: 788 - DNA, 2140 bp, Homo sapiens
ggcacgagggagcagctcctcttccatctccagggtctcattctgttgcccaggctggagtgcagtggtgcgatctcggctcacagcaacctctctgcctccagaaatgacctccaccttcaacccccgagaatgtaaactgtccaagcaagaagggcaaaactatggcttcttcctgcgaattgagaaggacaccgagggccacctggtccgggtggttgagaagtgtagcccagcagagaaggctggccttcaagatggagacagagttcttaggatcaatggtgtctttgtggacaaagaagaacatatgcaggttgtggatctggtcagaaagagtgggaattcagtgactttactagttctggatggggattcctatgagaaagcagtgaaaacacgggtggacttgaaagagttgggtcaaagtcagaaggagcaaggtttgagtgataatatactttcccctgtgatgaatggaggtgtgcaaacttggacccagccccggctctgctatctcgtgaaggaaggaggcagctatggcttctctctgaaaactgtccaaggtaaaaagggggtgtacatgactgatattacacctcaaggtgtggctatgagagctggagttctggctgatgatcacttgattgaagtgaatggagagaatgtagaggatgccagccatgaggaagtggttgaaaaggtgaagaagtcaggaagccgtgtcatgttcctgctggtggacaaagaaactgacaagcgtcatgttgagcagaagatacaattcaaaagagaaacagccagtttgaaactgttaccccaccagccccgaattgtggagatgaagaaaggaagcaatggctatggtttctatctgagggcaggctcagaacagaaaggtcaaatcatcaaggacatagattctggaagtccagcagaggaggctggcttgaagaacaatgatctggtagttgctgtcaacggcgagtctgtggaaaccctggatcatgacagtgtggtagaaatgattagaaagggtggagatcagacttcactgttggtggtagacaaagagacggacaacatgtacagactggctcatttttctccatttctctactatcaaagtcaagaactgcccaatggctctgtcaaggaggctccagctcctactcccacttctctggaagtctcaagtccaccagatactacagaggaagtagatcataagcctaaactctgcaggctggctaaaggtgaaaatggctatggctttcacttaaatgcgattcggggtctgccaggctcattcatcaaagaggtacagaagggcggtcctgctgacttggctgggctagaggatgaggatgtcatcattgaagtgaatggggtgaatgtgctagatgaaccctatgagaaggtggtggatagaatccagagcagtgggaagaatgtcacacttctagtctgtggaaagaaggcctatgattatttccaagctaagaaaatccctattgtttcctccctggctgatccacttgacacccctccagattctaaagaaggaatagtggtggagtcaaaccatgactcgcacatggcaaaagaacgggcccacagtacagcctcacattcttcttccaattctgaagatacagagatgtgatgaaaacaagtaatagctttggctgtttatttgatagctgtttctgggtatttaataggaatcctttctcaaggaatgagttgtgacctgtttactgtctctttagaagaaaaactccactggaaaccattcaccatgtgtgattgtcttctgttatcatttgtcttacaggcggctattgcagacggctaatttatgcttaacttaggaagagataaggcaagagctagatttttttcatgtgatcttttccaagcttcaacttaacttaactacatttctctgtatgatgatgtctcttacttctacaggttccttgagcaccaaagatgattcataactctgtataggtgacagctgcttataaaagcatcttagcagataagcctattaaaattgtgcttttgtaacaatgttgtggttgctagaataaataccattaacaaatgcaaaaaaaaaaaaaaaaaaaaaaaa

SEQ ID NO: 789 - DNA, 60 bp, Homo sapiens
gtcttacaggcggctattgcagacggctaatttatgcttaacttaggaagagataaggca

SEQ ID NO: 790 - DNA, 2766 bp, Homo sapiens
cgattggtgttggcggtctggctcagctgggcagggggtaactttactgatttgggggtggtttttagtttaatttttcttttctagcttcccatcgacggtcagtgcgcacgttgtaatcagctgaggccatgtcaggagacggagccacggagcaggcagctgagtatgtcccagagaaggtgaagaaagcggaaaagaaattagaagagaatccatatgaccttgatgcttggagcattctcattcgagaggcacagaatcaacctatagacaaagcacggaagacttatgaacgccttgttgcccagttccccagttctggcagattctggaaactgtacattgaagcagagattaaagctaaaaattatgacaaggttgaaaagctatttcagagatgccttatgaaggttttgcacattgatttatggaagtgttatctttcatatgtccgagaaaccaagggtaaactaccaagttacaaagaaaaaatggctcaagcatatgactttgcactggataaaattggaatggaaattatgtcctatcagatttgggtggattacatcaatttcctaaaaggcgtggaagctgtaggatcttatgcagaaaatcaaagaataacagctgtccgaagagtttatcaacgaggttgtgttaatccgatgatcaacattgaacagctctggagagactataacaagtatgaagagggtatcaatattcatttagctaaaaaaatgattgaagatcggagtagagattatatgaatgctagacgtgtagcaaaggaatatgagacagtaatgaaaggcttggaccgtaatgctccctcggtgcctcctcagaatactcctcaagaagctcaacaagtagatatgtggaagaaatatatacagtgggaaaagagcaaccctcttcgtacagaggatcagacccttataacaaaaagagttatgtttgcttatgaacagtgcctgcttgtgctgggccatcaccctgatatttggtatgaagctgcccagtatcttgagcagtcaagtaaactgctcgcagaaaagggagatatgaataatgccaaattatttagtgatgaagctgctaatatatatgaaagagccataagcactttattgaagaagaatatgcttctttattttgcatatgcagattatgaagagagtcgcatgaagtatgaaaaggttcacagtatatataacagacttctggcaattgaggatattgaccctaccttggtatatatccaatatatgaaatttgcacggagagcagaaggcatcaaatctggaagaatgatatttaaaaaagcaagagaagataccagaacccgccaccatgtctatgttactgcagcactcatggaatattactgtagtaaggacaaatctgttgcctttaagatttttgagctggggctaaaaaaatatggagacattccagagtatgtcctggcctatattgactatctttctcacctcaatgaggacaataatacccgagttttgtttgaacgagttttaacatctggaagccttcctcctgagaagtctggagaaatctgggcccgatttctagcatttgaaagtaatattggtgatctagctagtatactcaaagtggagaaaagacggtttacagcattcaaagaagagtatgaagggaaagaaacggctttactagtagatagatacaagttcatggatttatatccttgctctgcaagtgaattaaaagcacttggttataaggatgtctcccgtgctaagctagcagctataattccggacccagttgtagctccttctatagtgcctgttctgaaagatgaagtggatagaaaaccagaataccctaaaccagacactcagcagatgattccatttcagccacgacatttagcacctccaggtttacaccctgtacctggtggagtgttcccagtccctcctgcagctgttgttttaatgaaacttctccctcctcctatctgtttccagggtccttttgtacaagtggatgaactgatggaaattttccgaagatgcaagataccaaatactgttgaggaagctgtgaggatcattactggtggggccccagagctagctgtagaaggcaacggccccgtggaaagtaatgcagtactcaccaaggccgtcaaaaggcccaacgaggattcagatgaagatgaagaaaagggagccgttgtcccccctgttcatgacatttacagagcacggcagcagaagcggattcggtagggttttaaacgcctctgcagaaaactcctgtccaggattccttttgcctcaagtggtatgtttaaaagagacaacgctttgttacaaggttcttggaaacaaagttgtattgtcattggtgcctctatcacatggttcttgagaaaaaacaaaccaacctgtgtgaattttagaatacggaacagacctatgctctaagcaaaattaggttttcaaaaatgtgagaacagtacaaagtggcagaaccacattttgttccctcttcaagggtgtcttgtatgtgccgcttgaagatttgtgagtttttcaacagttttattttaaaaactggatggcttatgattgtaaagcattttatcacattttctgaaaacaattgttcttggtttgcttatgtagagtcctgccttattgtttgtttttatttatggcagaatgtatgaaatccgttttgtagtttcaaattttaaaagtcctttaa

SEQ ID NO: 791 - DNA, 60 bp, Homo sapiens
gtggtatgtttaaaagagacaacgctttgttacaaggttcttggaaacaaagttgtattg

SEQ ID NO: 792 - DNA, 2530 bp, Homo sapiens
cagcttccctgtggtttcccgaggcttccttgcttcccgctctgcgaggagcctttcatccgaaggcgggacgatgccggataatcggcagccgaggaaccggcagccgaggatccgctccgggaacgagcctcgttccgcgcccgccatggaaccggatggtcgcggtgcctgggcccacagtcgcgccgcgctcgaccgcctggagaagctgctgcgctgctcgcgttgtactaacattctgagagagcctgtgtgtttaggaggatgtgagcacatcttctgtagtaattgtgtaagtgactgcattggaactggatgtccagtgtgttacaccccggcctggatacaagacttgaagataaatagacaactggacagcatgattcaactttgtagtaagcttcgaaatttgctacatgacaatgagctgtcagatttgaaagaagataaacctaggaaaagtttgtttaatgatgcaggaaacaagaagaattcaattaaaatgtggtttagccctcgaagtaagaaagtcagatatgttgtgagtaaagcttcagtgcaaacccagcctgcaataaaaaaagatgcaagtgctcagcaagactcatatgaatttgtttccccaagtcctcctgcagatgtttctgagagggctaaaaaggcttctgcaagatctggaaaaaagcaaaaaaagaaaactttagctgaaatcaaccaaaaatggaatttagaggcagaaaaagaagatggtgaatttgactccaaagaggaatctaagcaaaagctggtatccttctgtagccaaccatctgttatctccagtcctcagataaatggtgaaatagacttactagcaagtggctccttgacagaatctgaatgttttggaagtttaactgaagtctctttaccattggctgagcaaatagagtctccagacactaagagcaggaatgaagtagtgactcctgagaaggtctgcaaaaattatcttacatctaagaaatctttgccattagaaaataatggaaaacgtggccatcacaatagactttccagtcccatttctaagagatgtagaaccagcattctgagcaccagtggagattttgttaagcaaaccgtgccctcagaaaatataccattgcctgaatgttcttcaccaccttcatgcaaacgtaaagttggtggtacatcagggaggaaaaacagtaacatgtccgatgaattcattagtctttcaccaggtacaccaccttctacattaagtagttcaagttacaggcaagtgatgtctagtccctcagcaatgaagctgttgcccaatatggctgtgaaaagaaatcatagaggagagactttgctccatattgcttctattaagggcgacataccttctgttgaataccttttacaaaatggaagtgatccaaatgttaaagaccatgctggatggacaccattgcatgaagcttgcaatcatgggcacctgaaggtagtggaattattgctccagcataaggcattggtgaacaccaccgggtatcaaaatgactcaccacttcacgatgcagccaagaatgggcacgtggatatagtcaagctgttactttcctatggagcctccagaaatgctgttaatatatttggtctgcggcctgtcgattatacagatgatgaaagtatgaaatcgctattgctgctaccagagaagaatgaatcatcctcagctagccactgctcagtaatgaacactgggcagcgtagggatggacctcttgtacttataggcagtgggctgtcttcagaacaacagaaaatgctcagtgagcttgcagtaattcttaaggctaaaaaatatactgagtttgacagtacagtaactcatgttgttgttcctggtgatgcagttcaaagtaccttgaagtgtatgcttgggattctcaatggatgctggattctaaaatttgaatgggtaaaagcatgtctacgaagaaaagtatgtgaacaggaagaaaagtatgaaattcctgaaggtccacgcagaagcaggctcaacagagaacagctgttgccaaagctgtttgatggatgctacttctatttgtggggaaccttcaaacaccatccaaaggacaaccttattaagctcgtcactgcaggtgggggccagatcctcagtagaaagcccaagccagacagtgacgtgactcagaccatcaatacagtcgcataccatgcgagacccgattctgatcagcgcttctgcacacagtatatcatctatgaagatttgtgtaattatcacccagagagggttcggcagggcaaagtctggaaggctccttcgagctggtttatagactgtgtgatgtcctttgagttgcttcctcttgacagctgaatattataccagatgaacatttcaaattgaatttgcacggtttgtgagagcccagtcattgtactgtttttaatgttcacatttttacaaataggtagagtcattcatatttgtctttgaatc

SEQ ID NO: 793 - DNA, 60 bp, Homo sapiens
agcatgtctacgaagaaaagtatgtgaacaggaagaaaagtatgaaattcctgaaggtcc

SEQ ID NO: 794 - DNA, 2332 bp, Homo sapiens
ggcacgaggctgtgctcccggcgctgacgtgtctgggcggtcggcttccactccttcaggcgtcggcagccactagtcgtggcgagaggggcggggtggccggggctggcgctccacttggcccccgctcccggcccgccccgccgccgcggccccccggatgagggtatatattcggagcgagcgcgggacgccgatgagtggccgcgcggaaggagctggagacggtcgtagctgcggtcgcgccgagaaaggtttacaggtacatacattacacccctatttctacaaagcttggctattagagcattatgaacattaatgacctcaaactcacgttgtccaaagctgggcaagagcacctactacgtttctggaatgagcttgaagaagcccaacaggtagaactttatgcagagctccaggccatgaactttgaggagctgaacttctttttccaaaaggccattgaaggttttaaccagtcttcttaccaaaagaatgtggatgcacgaatggaacctgtgcctcgagaggtattaggcagtgctacaagggatcaagatcagctccaggcctgggaaagtgaaggacttttccagatttctcagaataaagtagcagttcttcttctagctggtgggcaggggacaagactcggcgttgcatatcctaaggggatgtatgatgttggtttgccatcccgtaagacactttttcagattcaagcagagcgtatcctgaagctacagcaggttgctgaaaaatattatggcaacaaatgcattattccatggtatataatgaccagtggcagaacaatggaatctacaaaggagttcttcaccaagcacaagtactttggtttaaaaaaagagaatgtaatcttttttcagcaaggaatgctccccgccatgagttttgatgggaaaattattttggaagagaagaacaaagtttctatggctccagatgggaatggtggtctttatcgggcacttgcagcccagaatattgtggaggatatggagcaaagaggcatttggagcattcatgtctattgtgttgacaacatattagtaaaagtggcagacccacggttcattggattttgcattcagaaaggagcagactgtggagcaaaggtggtagagaaaacgaaccctacagaaccagttggagtggtttgccgagtggatggagtttaccaggtggtagaatatagtgagatttccctggcaacagctcaaaaacgaagctcagacggacgactgctgttcaatgcggggaacattgccaaccatttcttcactgtaccatttctgagagatgttgtcaatgtttatgaacctcagttgcagcaccatgtggctcaaaagaagattccttatgtggatacccaaggacagttaattaagccagacaaacccaatggaataaagatggaaaaatttgtctttgacatcttccagtttgcaaagaagtttgtggtatatgaagtattgcgagaagatgagttttccccactaaagaatgctgatagtcagaatgggaaagacaaccctactactgcaaggcatgctttgatgtcccttcatcattgctgggtcctcaatgcagggggccatttcatagatgaaaatggctctcgccttccagcaattccccgcttgaaggatgccaatgatgtaccaatccaatgtgaaatctctcctcttatctcctatgctggagaaggattagaaagttatgtggcagataaagaattccatgcacctctaatcatcgatgagaatggagttcatgagctggtgaaaaatggtatttgaaccagataccaagttttgtttgccacgataggaatagcttttatttttgatagaccaactgtgaacctacaagacgtcttggacaactgaagtttaaatatccacagggttttattttgcttgttgaactcttagagctattgcaaacttcccaagatccagatgactgaatttcagatagcatttttatgattcccaactcattgaaggtcttatttatataattttttccaagccaaggagaccattggccatccaggaaatttcgtacagctgaaatataggcaggatgttcaacatcagtttacttgcagctggaagcatttgtttttgaagttgtacatagtaataatatgtcattgtacatgttgaaaggtttctatggtactaaaagtttgttttattttatcaaacattaagcttttttaagaaaataattgggcagtgaaataaatgtatcttcttgtctctggaaaaaaaaaaaaaaaaaaaaaaaaaaaaaa

SEQ ID NO: 795 - DNA, 60 bp, Homo sapiens
gccaaccatttcttcactgtaccatttctgagagatgttgtcaatgtttatgaacctcag

SEQ ID NO: 796 - DNA, 758 bp, Homo sapiens
  misc_feature 732, 743: n = A,T,C or G
ttttttttttttttttttgtatacaggatatatatttattaacagtgaaaaagcatttacccaaagtcaatgttacaaaatacaaagagtacctccacagtctggccagctcattattttaggcattatctcaacctgcataaagttctctctcactcattttgaacttttctccctctatctatctgtaaccaaaatttttaacttcaaaattaggacaaataggaatactgaatgcctaacccttcagcaatagttactagagaaaacagattaaataaatatatctgctctcaaaccctacgtattttaaaactaaattatctactaaaatagaaaaacaatagacttagattaatagcagctgtaacaccagtcaagcaattctgataaggttcataggtactatggtaataactaagatataaatacaatttttccactttaatatgcatgcagacagagagagaaacacagtatgtaaggctgggcttgagtaccaaaacagtttttaccctttcctgcttaaagtggagaaaataaagaatttgagtgtgcatgtaacataacttattgttccaatttccctgaagttagttagagcacctggataagaactccgaattctgaattggtaattttctgaataggttttattaaagttgaagatatattgtcttccataatttaagtagcaatacagtaaatgtcctcgcagggaattcctcattntatactccttngatggacatacactg

SEQ ID NO: 797 - DNA, 60 bp, Homo sapiens
agttcaaaatgagtgagagagaactttatgcaggttgagataatgcctaaaataatgagc

SEQ ID NO: 798 - DNA, 411 bp, Homo sapiens
gaggggcactgaaaagatgttctttgaaacttgatttatatatttttacttgcaaaagaatatactgtgttttgagtatgaaagtgtgattgggtctgttgtgggaaccactgactgatgccataatttgcacttaaaggctataaattacatagttagccgtactttagtactagaaacagtaaattgacatccttgaactaattcctaccttttttttgtttctgaagaaataaagagtatattaagcaaagggataatttatatttcaggttggacaatttaccctaaacaaattaaaccatggaaagtgcaaacacatgaatgaaacatttttttacatcaaagtatcatcaaagattcttgtttcatttgataaaattaatatttgaataaaaaaatttttaaatc

SEQ ID NO: 799 - DNA, 60 bp, Homo sapiens
tagttagccgtactttagtactagaaacagtaaattgacatccttgaactaattcctacc

SEQ ID NO: 800 - DNA, 6817 bp, Homo sapiens
cagctccgaggggagtcggaccggagcaaacagccacccccggcttcgtcccccacgaagaggaagggcaggagccgtgccctcgaggccgtgcccgccccgcccgccagcggcccccgggctcccgccaaggagtccccacccaagagggtgcccgatcccagcccagtcaccaagggcactgcggccgagagcggggaggaggcggcgcgggccatcccccgcgagctcccggtcaagagcagctcgctgctgccggagatcaagcccgagcacaagaggggcccgctccccaaccacttcaacggccgggcagagggaggtcgaagcagagagctgggcagagcggccggagcgcctggagcttctgacgccgacggcttgaagcccaggaaccatttcggcgtgggcaggtcgacagtgaccactaaagtgaccctccctgccaagcccaaacatgtggaactaaatcttaaaacccctaagaatcttgacagtttgggaaatgagcacaatccatttagccagccagttcacaaaggcaacactgccaccaaaatctccttatttgaaaacaaacggacaaacagtagcccaagacacactgacattcgaggcccaaggaatactcctgcctctagtaaaacgtttgttgggagggcaaagctgaatttagccaaaaaagccaaagaaatggagcaacctgaaaagaaagtaatgccaaacagtccccagaatggtgtgctggttaaggaaactgctatagaaaccaaagttaccgtctcggaagaagagattctgccagcaaccagaggaatgaatggagactcttctgagaatcaagctcttggtcctcagcctaaccaagatgataaagcagatgtacaaacagatgctggctgcctttcagaaccagtggcttctgctctgattcctgtcaaggatcataagctcttagagaaggaggactcagaggctgcagacagcaaaagccttgtacttgaaaatgtaaccgatacagcacaagacatccccaccactgtggataccaaagatttacctccaacggccatgccaaagccacagcatacattttctgactcacagtcccctgctgagtcatctcctgggccttctctttcactgtctgcacccgctcctggggatgttcccaaagacacatgtgttcaatcacccataagcagtttcccatgcactgatctaaaagtgtcagaaaaccataaaggatgtgttttgcctgtgtctcgtcagaacaatgagaaaatgccacttttagaacttggaggagaaacaacccctcctttgtccacagagcgtagtccagaagctgtgggaagtgagtgtccatccagagtcctcgtccaggtcaggtccttcgtgctccccgtggagagcacccaggatgtgagctcccaggtcatcccagagagctctgaagttagagaagtgcagttgccaacttgtcacagtaatgaacctgaagtggtttccgttgcaagttgtgctcccccacaagaggaagtactgggcaatgaacactctcattgcacagcagagctcgcggcaaaatctggcccacaagtcataccgccagcatcagagaaaactctgcctattcaggctcaaagtcagggcagcagaacacccctgatggctgaatccagtcccaccaactctcccagcagcggaaatcacttagccactcctcaaaggccagatcagactgttacaaatggccaggatagccctgccagccttttgaacatttctgctggtagtgatgatagtgtatttgattcttcttctgatatggaaaaattcactgaaattataaaacagatggatagcgcagtttgtatgcccatgaaaagaaagaaggccaggatgccaaactctcctgctcctcactttgccatgcctcctattcacgaagaccatttagaaaaggtgtttgatcccaaagtgtttacctttggtttggggaagaagaaggaaagtcagccagaaatgtcaccggctttacatttgatgcagaaccttgacacaaaatccaaactgagacccaaacgtgcatctgctgaacagagcgtcctcttcaagtccctgcacaccaacactaatgggaacagtgagcctctggtgatgccggaaatcaatgacaaagagaacagggacgtcacaaatggtggcattaagagatcgagactagaaaaaagtgcacttttctcaagcttgttatcttctttaccacaagacaaaatcttttctccttctgtgacatcagtcaacactatgaccacggctttcagtacttctcagaacggttccctatctcagtcttcagtgtcacagcccacgactgagggtgccccgccctgtggtttgaacaaagaacagtcaaatcttctgcccgacaactccttaaaggtcttcaatttcaactcgtcaagtacatcacactccagtttgaaaagtccaagccacatggaaaaatacccgcaaaaagagaaaaccaaagaagatctggattcacgaagcaacctacacttgccagaaactaaattttctgaattgtcaaaactgaagaatgatgatatggaaaaggctaatcatattgaaagtgttattaaatcaaacttgccaaactgtgcaaacagtgacaccgacttcatgggtcttttcaaatcaagccggtatgacccaagcatttctttttctggaatgtcattatcagacacaatgacacttagaggaagtgtccaaaataaactcaatccccgacctggaaaggtagtgatatatagtgaacccgacgtctctgagaagtgcattgaagttttcagtgacattcaggattgcagttcttggagcctctctccagtgatactcataaaagttgttagaggatgttggattttgtatgagcaaccaaattttgaagggcactccatccccttagaagaaggagaattggaactctctggtctctggggtatagaagacattttggaaaggcacgaagaagcagagtctgataagccagtggtgattggttccatcagacatgtggttcaggattacagagttagtcacattgacttatttactgaaccagaagggttaggaatcctaagttcctactttgatgatactgaagaaatgcagggatttggtgtaatgcagaagacttgttccatgaaagtacattggggcacgtggctgatttatgaagaacctggatttcagggtgttcctttcatcctggaacctggtgaataccctgacttgtccttctgggatacagaagcagcgtacattggatccatgcggcctctgaaaatgggtggccgtaaagttgaattccctacagatccaaaggtagttgtttatgaaaagcctttctttgaaggaaaatgtgtggaactagaaacaggaatgtgtagttttgtcatggagggaggtgaaacagaagaggcgactggagacgatcatttgccgtttacgtcagtggggtctatgaaagttctaagaggcatttgggttgcatatgagaagcctggatttaccggtcatcagtatttgctagaagaaggagaatacagggactggaaagcctggggaggttacaatggagagcttcagtctttacgacctatattaggtgatttttcaaatgctcacatgataatgtacagtgaaaaaaactttggatccaaaggttccagtattgatgtattgggaattgttgctaatttaaaggagactggatatggagtgaagacacagtctattaatgtactgagtggagtatgggtagcctatgaaaatcctgacttcacaggagaacagtatatactggataaaggattttataccagttttgaggactggggaggcaaaaattataagatctcttctgttcaacctatatgtttggattctttcactggcccaaggagacgaaatcagattcacttgttttcagaaccacagtttcaaggtcacagtcaaagttttgaagaaacaacaagtcaaattgatgattcattttctaccaagtcttgcagagtttcaggaggcagctgggttgtatatgatggagaaaatttcactggtaatcaatacgtgttggaagaaggccattatccttgtctgtctgcaatgggatgcccgcctggagcaactttcaagtctcttcgttttatagatgttgaattttctgaaccaacaattattctctttgaaagagaagacttcaaaggaaaaaagattgaacttaatgcagaaactgtcaatctccgatccctgggattcaacacacaaatacgctctgttcaggttattggtggcatatgggttacttatgaatatggcagttacagagggcgacagttcctattgtcacctgcagaagtacctaattggtatgaattcagtggctgtcgccaaataggttctctacgaccttttgttcagaagcgaatttatttcagacttcgaaacaaagcaacagggttattcatgtcaaccaatggaaacttagaggatctgaagcttctgaggatacaggtcatggaggatgtcggggccgatgatcagatttggatctatcaagaaggatgtatcaaatgcaggatagcagaagactgctgcctgacgattgtgggcagcctggtaacatctggctccaagctaggcctggccctggaccagaatgctgacagccagttctggagcttgaagtccgatggcaggatttacagcaagttgaagccaaatttagttttagacattaaagggggcacacagtatgatcaaaatcacattatcctcaacactgtcagcaaagagaagtttacacaagtgtgggaagccatggtcctatatacctgaacaaagaaggaagaagaatcttctggaggtccttccagccaccttatttcttaaaaaggacaatgctgatggaagaccagactggaaagtggatcgactcctccttcattgattctaaattcaaccttaaatcatgctgccatgactcagagaacttactcatcgtttcaaaagactatcatagctttaaaccaataatttgtcctcctttcatttcttgcctttcatttttggtagctgcttaaacaggttgcctaattagcagcttttgggtgattttgtaaaatgttatatcaagatttcaagactgtgtacattttaaattatttccaaagatagtgacaggagagaactggaacaaatttaccaactttgtggacctacaaagcccttacactttaaagggtaagacaaaggcttaagtttgaaaggtagagaactgtttagcatctgagaagaaatactttattaggcctgtaattttggttcttggccttaaacactttctggaacctttaaatatgctgcatagcacaatgggaaagccttaggtattcacacatttaaggaactctaaacaaaatactattttcctttagttcatattaaaaattaatacattttaaaaatttaatgtcaaagtctggtaacatttgttagtaggatttgagttattattttttgagacaggatctcaggctggagtgcagtggcacaatcacggctcactgcagcctctacctccccaggctcaggtgatcctcccacctcagcctcccaagtagctgggactataggcacacatcaccaagcccagccaaattttgttttttttttgtagagatggggtttcatcacgttgcccaggctgatctcgaacctctgggctcaagcaattcactcgcctcggcctcccaaaatgctgggattacaggcctgagccactgcgcccagccaggatttgaattattttaactcatccatgggctgccctagaatgtcacaaatgagggttgtttaatgcctttcttatagctgctactggaacactattatgacctaatttatgagccatccttactcatctacaagtgctgaagcaatgttacatacttttttgctaaactcagattttttagcctaatttcttgtcctcctatccacctgcatccacacatggcctgcatggggctgccttccctgcagtgttctgcagccatgcttcagggtatagctgttggtggacagcctcaggtcttgggggcactatagccactaaacgaggtgtgaaaggctcaagaggatgaccagcaattaattatccccagaaagtgaaggaaaagagacctttagggatgttgctggtcaagtcttgatttgaccggagtcaaatcaatcttcaagcaatcttggaatcctcaactgcagtaagcatttcaaaatgcaaacaaactgcttaacaactgacaagacaccagcccatatgctgctcttccaacagtgggttctagctttgaacaaaagtgctaaacatttccttgaatatattcttcctctttttgtcctcatcactcaatactggtgctcttgtcacaggtagaacagcttgtttcttttccatctattcaagtgtgtttctaattctaaaatgctgatcttctctggagtctatggtaggcaattatggtcactggaatagtttgtcttgttttaaaatattattggtgcatgtacaacagcatccaacatatctgtcttgttcctagatatatagctctgattttaggccttttgtgcataccattacaatatggtggggtaagacattctacagtagcctgtgctgaactgatctcttaaataaacttgcttctggttaactaaaaaaaaaaaaaaaaaaaaa

SEQ ID NO: 801 - DNA, 60 bp, Homo sapiens
tctaattctaaaatgctgatcttctctggagtctatggtaggcaattatggtcactggaa

SEQ ID NO: 802 - DNA, 1774 bp, Homo sapiens
tgttcctgcctctccgccacctccaccgcggcttatcccctggctggcggcgttggcggggcgggggacagtagttgtagacgcccgcccctgcctcagagaagataccacattgaatgaacaaagactgaactttgtttacagataccttttataaaagatgtctgtggagtagtgttacagttcaaataacaaaggattttgcattatgagatgagtgagagtggagaattggacaaaaattgatttttgatctctgaattgtggtttttagctcaccagttattgtgtagtctcactatttgaaaattcatgctgaaaaactgagtgaatatgatcagatttctccaccaaattctcagcctgataaggaaaatcccgttttgtcaacctaatgaagcattcaaagaagacatatgactcttttcaagatgaacttgaagattatattaaagtacagaaagccagaggcttagagccaaagacttgtttcagaaagatgaaaggggactatttggaaacctgtgggtacaaaggagaggttaattccagacccacgtatagaatgtttgaccagagactcccatctgaaaccatccagacctacccaagatcatgcaatattccacaaacagtggaaaatcggttgcctcagtggttaccagcccatgacagcagattgagactagactctctgagctactgtcagttcacgagggactgtttctcagaaaaaccagtacccctgaactttaatcaacaagaatatatttgtggctcacatggtgtagaacatagagtttacaagcacttctcctcagataacagtaccagtactcatcaagccagtcacaaacagatacatcagaagaggaaaaggcacccagaggaaggcagagaaaaatcagaggaggagcggtctaagcataagagaaaaaaaagctgcgaggaaattgacttagacaaacacaagagcatccaaagaaagaaaacagaggtggaaatagaaaccgtacatgtcagtacagaaaagcttaagaatcgaaaggagaaaaaaagccgagatgtagtctctaagaaagaggaacgtaagcgtacaaaaaagaaaaaggaacaaggccaagaaaggacagaggaggaaatgctttgggaccagtctattcttggattttgaagctttcaaagttggttctcccaaagttaaattgaaaaaataggtgagagcttggttttatgatatccgtgttcataccacttttcttatgtgaataggttctttaacttctaacaaaggcctagtaaacaaagtgtttagcatgcttgctctccaacacagaaattgcttttcctcattttctaaaagcattattacattttttgaacatatagtgtaatttcctttaatgaaagtgactctgcttttattcatcaaattgctttgatggtggaaatattttctgttgggaggttatttattttaaattggaggattaatgacctttgcacaatctgtttcttgattgggtttgttatagttttgagttgggtattttatgttcattggtttttctctgtgaagcaatttttttctcctttattagatctaacttgcagtgtattttctaggctggaaagtggaaaatgaaatatattatgatcttaggttacataaagtttctaaagtttcaaagagtcttgatacaaaatcagtttatattctgaaaatatttataataaagtattctaatttctaaaaaaaaaaaaaaaaaaaaaa

SEQ ID NO: 803 - DNA, 60 bp, Homo sapiens
tgtgaataggttctttaacttctaacaaaggcctagtaaacaaagtgtttagcatgcttg

SEQ ID NO: 804 - DNA, 10697 bp, Homo sapiens; identical to SEQ ID NO: 786

SEQ ID NO: 805 - DNA, 60 bp, Homo sapiens
caaaatgacatgtaaactgacttttcccgtattagtattccaaagatgcttaaaagtggc

SEQ ID NO: 806 - DNA, 3592 bp, Homo sapiens
ggcgcgggcggaggctaaaacacgggggtcctgagactgaggaaaacgcgccaagttcccctcggtggcggagtgctaaagaccctagcggttcaggcgttcggcgagcggggccgctgcttgttgcgctcctggctctcccggggcgggcgcagatgggcgccgctcccgggatgtagttggtgttggtgcaaggcgggagcgagcggcggtcggggttcccgctcttgggagcggatggtcactcccccgcggggagggcgagccgaccagattttcctggggccggggacccggcgggctcggggcagggactcacctgtcgcacccacactcattcgggttggacttgccggcgtcaccgccgcggacttcgctttgggccatgaccagatataattggtgattacaactttcctctataaattaactcttgacactccttgggatttgaagaaaaaaatgcctggtgtcatacctagtgaaagtaatggactttcaagaggtagcccttcaaagaaaaacagactttccttaaagttttttcagaaaaaggaaactaagagagctttggatttcacagattctcaagaaaatgaagaaaaagcttctgaatatagagcatctgaaattgatcaagttgttcctgcagcacagtcttcacctataaactgtgagaagagagaaaacttgttaccatttgtgggactgaataatctcggcaatacttgctatcttaatagtatacttcaggtattatatttttgtcccggttttaaatctggagtaaagcacttatttaatattatttcaaggaagaaagaagctctaaaggatgaagccaatcaaaaagacaagggaaattgcaaagaagattctttggcaagttatgaattgatatgcagtttacagtccttaatcatttcggttgaacagctccaggctagttttctcttaaatccagagaaatatactgatgaacttgccactcagccaaggcgactgcttaacacactgagggaactcaaccctatgtatgaaggatatctacagcatgatgcacaggaagtattacaatgtattttgggaaacattcaagaaacatgccaactcctaaaaaaagaagaagtaaaaaatgtggcagaattacctactaaggtagaagaaatacctcatccgaaagaggaaatgaatggtattaacagcatagagatggacagtatgaggcattctgaagactttaaagagaaactcccaaaaggaaatgggaaaagaaaaagtgacactgaatttggtaacatgaagaaaaaagttaaattatccaaggaacaccagtcattggaagagaaccagagacaaactagatcaaaaagaaaagctacaagtgatacattagagagtcctcctaaaataattcccaagtatatttctgaaaatgagagtccaagaccctcacaaaagaaatcaagagttaaaataaattggttaaagtctgcaactaagcaacccagcattctttctaaattttgtagtctgggaaaaataacaacaaaccaaggagtcaaaggacaatctaaagaaaatgaatgtgatcctgaagaggacttggggaagtgtgaaagtgataacacaactaatggttgtggacttgaatctccaggaaatactgttacacctgtaaatgttaatgaagttaaacccataaacaaaggtgaagaacaaattggttttgagctagtggagaaattatttcaaggtcagctggtattaaggacgcgttgcttggaatgtgaaagtttaacagaaagaagagaagattttcaagacatcagtgtgccagtacaagaagatgagctttccaaagtagaggagagttctgaaatttctccagagccaaaaacagaaatgaagaccctgagatgggcaatttcacaatttgcttcagtagaaaggattgtaggagaagataaatatttctgtgaaaactgccatcattatactgaagctgaacgaagtcttttgtttgacaaaatgcctgaagttataactattcatttgaagtgctttgctgctagtggtttggagtttgattgttatggtggtggactttccaagatcaacactcctttattgacacctcttaaattgtcactagaagaatggagcacaaagccaactaacgacagctatggattatttgcggttgtgatgcatagtggcattacaattagtagtgggcattacactgcttctgttaaagtcactgaccttaacagtttagaactagataaaggaaattttgtggttgaccaaatgtgtgaaataggtaagccagaaccattgaatgaggaggaagcaaggggtgtggttgagaattataatgatgaagaagtgtcaattagagttggtggaaatacacagccaagtaaagttttgaacaaaaaaaatgtagaagctattggacttcttggaggacaaaagagcaaagcagattatgagctatacaacaaagcctctaatcctgataaggttgctagtacagcgtttgctgaaaatagaaattctgagactagtgatactactgggacccatgaatctgatagaaacaaggaatccagtgaccaaacaggcattaatattagtggatttgagaacaaaatttcatacgtagtgcaaagcttaaaggagtatgaggggaagtggttgctttttgatgattctgaagtcaaagttactgaagagaaggactttctgaattctctttccccttctacatctcctacttctactccttacttgctattttataagaaattatagagtgagtgtattttccttgtgtatatattaaacacacccatacaaacattggtaaagttgattacatcaaagaatctttagcttatcttttgaagctactggatattattggtctctctaggtttttatataaatagtgaaatctgaattactgaaaaccatgttaatttttagaactcattttcctcagtagagactagtgatgcattagcttctgggaacaaacttgtatcggttcttaattaaattatccaaaacggaggcatttaaacacttggatttacaccagtcttttgtgtttgctttttaaaataaagtgctcgtatttgtattctccatattttggagtaattatctacatgatgtttatagttcctgtggtttttcacccaagaagcagaatctcattcagtacatttagttttataagagtcatgaagctaaatccttgggctatgtcagaggcacaaagtctagaatgtgtgtattcacaatggtgtatgtacattttgtgccttgattcacttagaagtgtctcagaaaacctggacagttcgcttctacacaagaattttatatgtatttatgaagatgattctgtaccctagtatatctttttgggcatggactaatttgtatctgtttaactcatattctgcacgatctgtatatagtacatcaaacttagaggtgtgaccttaaatttaactttttttaaaaactgggaggtcaataaaatttaaactgcttaactatgaaaaaaaaaaaaaaa

SEQ ID NO: 807 - DNA, 60 bp, Homo sapiens
atctgtttaactcatattctgcacgatctgtatatagtacatcaaacttagaggtgtgac

SEQ ID NO: 808 - DNA, 3002 bp, Homo sapiens
gccagtcaccttcagtttctggagctggccgtcaacatgtcctttcctaaggcgcccttgaaacgattcaatgacccttctggttgtgcaccatctccaggtgcttatgatgttaaaactttagaagtattgaaaggaccagtatcctttcagaaatcacaaagatttaaacaacaaaaagaatctaaacaaaatcttaatgttgacaaagatactaccttgcctgcttcagctagaaaagttaagtcttcggaatcaaaggaatctcaaaagaatgataaagatttgaagatattagagaaagagattcgtgttcttctacaggaacgtggtgcccaggacagccggatccaggatctggaaactgagttggaaaagatggaagcaaggctaaatgctgcactaagggaaaaaacatctctctctgcaaataatgctacactggaaaaacaacttattgaattgaccaggactaatgaactactaaaatctaagttttctgaaaatggtaaccagaagaatttgagaattctaagcttggagttgatgaaacttagaaacaaaagagaaacaaagatgaggggtatgatggctaagcaagaaggcatggagatgaagctgcaggtcacccaaaggagtctcgaagagtctcaagggaaaatagcccaactggagggaaaacttgtttcaatagagaaagaaaagattgatgaaaaatctgaaacagaaaaactcttggaatacatcgaagaaattagttgtgcttcagatcaagtggaaaaatacaagctagatattgcccagttagaagaaaatttgaaagagaagaatgatgaaattttaagccttaagcagtctcttgaggagaatattgttatattatctaaacaagtagaagatctaaatgtgaaatgtcagctgcttgaaaaagaaaaagaagaccatgtcaacaggaatagagaacacaacgaaaatctaaatgcagagatgcaaaacttaaaacagaagtttattcttgaacaacaggaacgtgaaaagcttcaacaaaaagaattacaaattgattcacttctgcaacaagagaaagaattatcttcgagtcttcatcagaagctctgttcttttcaagaggaaatggttaaagagaagaatctgtttgaggaagaattaaagcaaacactggatgagcttgataaattacagcaaaaggaggaacaagctgaaaggctggtcaagcaattggaagaggaagcaaaatctagagctgaagaattaaaactcctagaagaaaagctgaaagggaaggaggctgaactggagaaaagtagtgctgctcatacccaggccaccctgcttttgcaggaaaagtatgacagtatggtgcaaagccttgaagatgttactgctcaatttgaaagctataaagcgttaacagccagtgagatagaagatcttaagctggagaactcatcattacaggaaaaagcggccaaggctgggaaaaatgcagaggatgttcagcatcagattttggcaactgagagctcaaatcaagaatatgtaaggatgcttctagatctgcagaccaagtcagcactaaaggaaacagaaattaaagaaatcacagtttcttttcttcaaaaaataactgatttgcagaaccaactcaagcaacaggaggaagactttagaaaacagctggaagatgaagaaggaagaaaagctgaaaaagaaaatacaacagcagaattaactgaagaaattaacaagtggcgtctcctctatgaagaactatataataaaacaaaaccttttcagctacaactagatgcttttgaagtagaaaaacaggcattgttgaatgaacatggtgcagctcaggaacagctaaataaaataagagattcatatgctaaattattgggtcatcagaatttgaaacaaaaaatcaagcatgttgtgaagttgaaagatgaaaatagccaactcaaatcggaagtatcaaaactccgctgtcagcttgctaaaaaaaaacaaagtgagacaaaacttcaagaggaattgaataaagttctaggtatcaaacactttgatccttcaaaggcttttcatcatgaaagtaaagaaaattttgccctgaagaccccattaaaagaaggcaatacaaactgttaccgagctcctatggagtgtcaagaatcatggaagtaaacatctgagaaacctgttgaagattatttcattcgtcttgttgttattgatgttgctgttattatatttgacatgggtattttataatgttgtatttaattttaactgccaatccttaaatatgtgaaaggaacattttttaccaaagtgtcttttgacattttattttttcttgcaaatacctcctccctaatgctcacctttatcacctcattctgaaccctttcgctggctttccagcttagaatgcatctcatcaacttaaaagtcagtatcatattattatcctcctgttctgaaaccttagtttcaagagtctaaaccccagattcttcagcttgatcctggaggtcttttctagtctgagcttctttagctaggctaaaacaccttggcttgttattgcctctactttgattctgataatgctcacttggtcctacctattatccttctacttgtccagttcaaataagaaataaggacaagcctaacttcatagaaacctctctatttttaatcagttgtttaataatttacaggttcttaggctccatcctgtttgtatgaaattataatctgtggattggcctttaagcctgcattcttaacaaactcttcagttaattcttagatacactaaaaatctgagaaactctacatgtaactatttcttcagagtttgtcatatactgcttgtcatctgcatgtctactcagcatttgattaacatttgtgtaatatgaaataaaattacacagtaagtcatttaaccaaaaaaaaaaaaaaaa

SEQ ID NO: 809 - DNA, 60 bp, Homo sapiens
tcacttggtcctacctattatccttctacttgtccagttcaaataagaaataaggacaag

SEQ ID NO: 810 - DNA, 4437 bp, Homo sapiens
gcgcggcggccgtggttgcggcgcgggaagtttggatcctggttccgtccgctaggagtctgcgtgcgaggattatggctgctgttcctcaaaataatctacaggagcaactagaacgtcactcagccagaacacttaataataaattaagtctttcaaaaccaaaattttcaggtttcacttttaaaaagaaaacatcttcagataacaatgtatctgtaactaatgtgtcagtagcaaaaacacctgtattaagaaataaagatgttaatgttaccgaagacttttccttcagtgaacctctacccaacaccacaaatcagcaaagggtcaaggacttctttaaaaatgctccagcaggacaggaaacacagagaggtggatcaaaatcattattgccagatttcttgcagactccgaaggaagttgtatgcactacccaaaacacaccaactgtaaagaaatcccgggatactgctctcaagaaattagaatttagttcttcaccagattctttaagtaccatcaatgattgggatgatatggatgactttgatacttctgagacttcaaaatcatttgttacaccaccccaaagtcactttgtaagagtaagcactgctcagaaatcaaaaaagggtaagagaaacttttttaaagcacagctttatacaacaaacacagtaaagactgatttgcctccaccctcctctgaaagcgagcaaatagatttgactgaggaacagaaggatgactcagaatggttaagcagcgatgtgatttgcatcgatgatggccccattgctgaagtgcatataaatgaagatgctcaggaaagtgactctctgaaaactcatttggaagatgaaagagataatagcgaaaagaagaagaatttggaagaagctgaattacattcaactgagaaagttccatgtattgaatttgatgatgatgattatgatacggattttgttccaccttctccagaagaaattatttctgcttcttcttcctcttcaaaatgccttagtacgttaaaggaccttgacacatctgacagaaaagaggatgttcttagcacatcaaaagatcttttgtcaaaacctgagaaaatgagtatgcaggagctgaatccagaaaccagcacagactgtgacgctagacagataagtttacagcagcagcttattcatgtgatggagcacatctgtaaattaattgatactattcctgatgataaactgaaacttttggattgtgggaacgaactgcttcagcagcggaacataagaaggaaacttctaacggaagtagattttaataaaagtgatgccagtcttcttggctcattgtggagatacaggcctgattcacttgatggccctatggagggtgattcctgccctacagggaattctatgaaggagttaaatttttcacaccttccctcaaattctgtttctcctggggactgtttactgactaccaccctaggaaagacaggattctctgccaccaggaagaatctttttgaaaggcctttattcaatacccatttacagaagtcctttgtaagtagcaactgggctgaaacaccaagactaggaaaaaaaaatgaaagctcttatttcccaggaaatgttctcacaagcactgctgtgaaagatcagaataaacatactgcttcaataaatgacttagaaagagaaacccaaccttcctatgatattgataattttgacatagatgactttgatgatgatgatgactgggaagacataatgcataatttagcagccagcaaatcttccacagctgcctatcaacccatcaaggaaggtcggccaattaaatcagtatcagaaagactttcctcagccaagacagactgtcttccagtgtcatctactgctcaaaatataaacttctcagagtcaattcagaattatactgacaagtcagcacaaaatttagcatccagaaatctgaaacatgagcgtttccaaagtcttagttttcctcatacaaaggaaatgatgaagatttttcataaaaaatttggcctgcataattttagaactaatcagctagaggcgatcaatgctgcactgcttggtgaagactgttttatcctgatgccgactggaggtggtaagagtttgtgttaccagctccctgcctgtgtttctcctggggtcactgttgtcatttctcccttgagatcacttatcgtagatcaagtccaaaagctgacttccttggatattccagctacatatctgacaggtgataagactgactcagaagctacaaatatttacctccagttatcaaaaaaagacccaatcataaaacttctatatgtcactccagaaaagatctgtgcaagtaacagactcatttctactctggagaatctctatgagaggaagctcttggcacgttttgttattgatgaagcacattgtgtcagtcagtggggacatgattttcgtcaagattacaaaagaatgaatatgcttcgccagaagtttccttctgttccggtgatggctcttacggccacagctaatcccagggtacagaaggacatcctgactcagctgaagattctcagacctcaggtgtttagcatgagctttaacagacataatctgaaatactatgtattaccgaaaaagcctaaaaaggtggcatttgattgcctagaatggatcagaaagcaccacccatatgattcagggataatttactgcctctccaggcgagaatgtgacaccatggctgacacgttacagagagatgggctcgctgctcttgcttaccatgctggcctcagtgattctgccagagatgaagtgcagcagaagtggattaatcaggatggctgtcaggttatctgtgctacaattgcatttggaatggggattgacaaaccggacgtgcgatttgtgattcatgcatctctccctaaatctgtggagggttactaccaagaatctggcagagctggaagagatggggaaatatctcactgcctgcttttctatacctatcatgatgtgaccagactgaaaagacttataatgatggaaaaagatggaaaccatcatacaagagaaactcacttcaataatttgtatagcatggtacattactgtgaaaatataacggaatgcaggagaatacagcttttggcctactttggtgaaaatggatttaatcctgatttttgtaagaaacacccagatgtttcttgtgataattgctgtaaaacaaaggattataaaacaagagatgtgactgacgatgtgaaaagtattgtaagatttgttcaagaacatagttcatcacaaggaatgagaaatataaaacatgtaggtccttctggaagatttactatgaatatgctggtcgacattttcttggggagtaagagtgcaaaaatccagtcaggtatatttggaaaaggatctgcttattcacgacacaatgccgaaagactttttaaaaagctgatacttgacaagattttggatgaagacttatatatcaatgccaatgaccaggcgatcgcttatgtgatgctcggaaataaagcccaaactgtactaaatggcaatttaaaggtagactttatggaaacagaaaattccagcagtgtgaaaaaacaaaaagcgttagtagcaaaagtgtctcagagggaagagatggttaaaaaatgtcttggagaacttacagaagtctgcaaatctctggggaaagtttttggtgtccattacttcaatatttttaataccgtcactctcaagaagcttgcagaatctttatcttctgatcctgaggttttgcttcaaattgatggtgttactgaagacaaactggaaaaatatggtgcggaagtgatttcagtattacagaaatactctgaatggacatcgccagctgaagacagttccccagggataagcctgtccagcagcagaggccccggaagaagtgccgctgaggagcttgacgaggaaatacccgtatcttcccactactttgcaagtaaaaccagaaatgaaaggaagaggaaaaagatgccagcctcccaaaggtctaagaggagaaaaactgcttccagtggttccaaggcaaagggggggtctgccacatgtagaaagatatcttccaaaacgaaatcctccagcatcattggatccagttcagcctcacatacttctcaagcgacatcaggagccaatagcaaattggggattatggctccaccgaagcctataaatagaccgtttcttaagccttcatatgcattctcataacaaccgaatctcaatgtacatagaccctctttcttgtttgtcagcatctgaccatctgtgactataaagctgttattcttgttataccaaaaaaaaaaaaaaaaaaaaa

SEQ ID NO: 811 - DNA, 60 bp, Homo sapiens
taagccttcatatgcattctcataacaaccgaatctcaatgtacatagaccctctttctt

SEQ ID NO: 812 - DNA, 6823 bp, Homo sapiens
ggcggacaaaacgccaggcggatctcagaaggccagttcaaagacgagatcatcagatgttcattcatctggatcttcagatgcacatatggatgcatctggaccctcagatagtgatatgccaagtcggacacgacctaagagcccaagaaaacataattataggaatgaaagtgcccgtgaaagcctttgtgattctcctcatcagaatctctcaagacctcttctggaaaacaaacttaaagcattcagtattggaaaaatgagtacagctaagcgaactttaagtaaaaaggaacaggaagaattaaagaaaaaggaggatgaaaaggcagctgctgagatttatgaggagtttcttgctgcttttgaaggaagtgatggtaataaagtgaaaacatttgtgcgagggggtgttgttaatgcagctaaagaagaacatgaaacagatgaaaaaagaggtaaaatctataagccatcttcaagatttgcagatcaaaaaaatcctccaaatcagtcttccaatgaaagaccaccatctcttcttgtgatagaaaccaaaaaacctccacttaaaaaaggagagaaagaaaagaaaaaaagcaatttggaactcttcaaagaagaattaaagcaaattcaagaggaacgtgatgagagacataaaacaaaaggcagattaagtcgatttgaacctcctcagtcagattctgatggtcagcgtcgttctatggacgcgccttcaagaagaaatagatcatctggtgttcttgatgattacgcacctggctcacatgatgtaggagatccaagcactactaatttataccttggaaacattaatccacagatgaatgaagaaatgctgtgccaagaatttggaagatttggaccgttagccagtgtgaaaatcatgtggcctagaactgatgaagaaagagccagagagagaaattgcggctttgtggcctttatgaatagaagagatgctgaaagagctttaaaaaatttgaatggaaaaatgattatgtcttttgaaatgaagttaggttggggtaaagctgtacctattcctccacatccaatatacattccgccttctatgatggaacatacgcttcccccacctccatccggactgccttttaatgcgcagcctagagagcggttaaaaaaccctaatgctcctatgttaccgccacctaaaaacaaagaggattttgagaagactctgtcgcaagccatagtcaaagtggttatcccaacagaaaggaatttgctcgccctgatacatcgaatgatagagtttgttgtacgtgaagggccaatgtttgaagctatgattatgaacagagaaatcaacaatcctatgttcaggttcttatttgaaaaccagacaccagcccatgtttactataggtggaagctttattctattctgcagggagattctccaactaaatggcggacggaagattttcgtatgttcaaaaatggatctttttggaggccaccaccattaaatccgtacttgcatggaatgtcagaagagcaagaaacagaagcttttgtagaggaacctagtaaaaagggagcacttaaggaagaacagagggataaattggaagaaatcttgcggggattaactccaaggaaaaatgatattggagatgcaatggttttctgtcttaataatgctgaagctgctgaagaaatagtggattgcattactgagtcgttgtccatcttaaagacaccccttcctaaaaagattgccagattatatttggtttctgatgttttgtacaactcttcagccaaagttgctaatgcttcatattatagaaaattttttgaaacaaagttatgtcagatattttcagacctcaatgccacctatcgtacaattcaaggccatttacaatctgaaaactttaagcaacgggtaatgacttgcttcagagcatgggaagattgggcaatttatccagaaccatttttgatcaaactacaaaatattttcttaggacttgtaaatattattgaagaaaaggaaacagaggatgttccagatgaccttgatggtgcccccatcgaggaagagcttgatggtgcacctctggaagatgtagatggaattcctattgatgctactcccatcgatgatcttgatggagtccctataaaaagtcttgatgatgatcttgatggagtgcctttggatgcaactgaagactcaaaaaagaatgagcctatatttaaagttgccccatcaaaatgggaagctgtggatgaatctgaattggaagcacaggctgttacaacttctaaatgggaattatttgaccagcatgaagaatcagaagaagaagaaaatcaaaatcaagaagaagaaagtgaagatgaagaagatactcaaagttccaaatctgaagaacatcatttgtactctaatccaatcaaagaagaaatgactgagtctaagttctctaagtactctgaaatgagtgaggaaaaacgagccaaacttcgtgaaattgagctcaaagttatgaagtttcaggatgaattggaatctgggaaaagacctaaaaaaccaggccagagttttcaggagcaagtagaacactacagagataaacttcttcaacgagagaaagagaaagagttagaaagagaacgagaaagagacaagaaagataaagaaaaattggaatctcgctccaaagacaagaaggaaaaagatgagtgtactccgacaaggaaggaaaggaagaggcgacacagtacatcccccagcccatctcgcagtagcagtggtagacgagtgaaatccccatcaccaaaatcggagcgatcagagcgttcagaaagatctcataaagagagctcacggtccaggtcatctcacaaagattctcctagagatgttagcaaaaaagccaaaagatcaccatctggttcaaggacacctaaaaggtctaggcgatcacggtctagatctcctaaaaaatcaggaaagaagtccagatcccagtccagatctccacacaggtctcataaaaagtcaaagaaaaacaaacactgacgtaaatttttaagatgctgtcacttattggaaatgcgatttgttttgtgcctgaacggtctgttttttaaaaaaacaaaaaatcaaatgaaagagcattcctggggttttttgtttgtttgtgtatgcatgtgtaaactcatgagcaactgcatctgtagatctgtcattgttttatattgtgtaaattactttcattgtggctatttctcaagatgaaatttttattgttctaatggatttcatcagaaatgtgtataatggatctgctgacagtagtagtattttgttttaggatgttgtgacttagcaaaaataatacagatgtcttccccccttttgtagctttgacaatttgaattagatttcaaataaaatctgaacagaaaactataatgttgtttttttgccccaccggtgatattaagtcccttaaagtcctactgagtttcacactactgttgtgcttcttatacctgatgcactttataagccccagtgttcaagtagcttaagttttatatttactaagatgactatccaaattaagggacctgagactcctatttggtggtttgctaaccatttgcttttgataagtttctcttgggtaatactaatacccagatatcaaagactaggtagatatggcatggcgttttgttagtggaatgcctggctaaaacatttttttcacagaagcaatatgatttccatacatccaacccatgttctgagcaactacttacttttagggggaaattaaatatcttttcatttcctcttctattatgaaagaagtttatttgtaaaacaaattttctaacaaggtttggccatagaattctcttgtatgattgttgaccttttataatcttctgtaggctatctttcaaacactggcatcagaatattttttataagtttgtgtttaaacagcttagttggtccccccccccactcccaagagacttgggtttagttatagctttaagtaaaatttaaaaataaaatgtttttcaggaaacttcgtatctaatggtttgtaaattcaaggtgcaaaaagttgatttaaaccatttgcagagttgaactctattatgaaaataaatttgctacggtatgaggaagaaataaaacttgtgtaatgttggtcataatactgctataaatataataaagggttatgtagaattgaactgacactattatttgtgaatcttgatttcagttttttatgtaggcacttcatacactggtttgatgggttttttttttcctccctaaaagagaaagtagaaaactattctaacaatggattattttgatttagcttgctttttaaaaaaatcttttcaacttgttttacttaatcttgcctagtcacaaaataagatgtgcacccatggtttggagagttcctatattagctgagcagtgagatacactatttccaaacggtgcacacctacagtagctttggaaatgagccaatcactgttttacttaatggttcttatcagcatgcaaatattgcttgaaagttatttccttattcactgttttgttagtccattttgttaggaaacattaattcctaaaaatttgttcagaataattaaaagtgaacatttggtgctgatactcaaaaacctacaaatgtagccatttaaaaagtaacatgtttttctcccctgctcattgcctgggagaatggaattttatataactacctttctttgcaaaaataacggtcgtgtcgagttggtggtgattttggcattccatcttgcactggtttctagtataggcttagaaataattggtcaggtaataatctttccagtcaagttgcaagggatgcttatttctcttcaaaaaaagacatcctgcgggattgagtagaaaattttaggtcagttttgggtgcttatttgtaatatttttcctactacattggagtttagcagttctttttttctggatccagatacaagtgtcatggtttatcttacagtgggtgaaactgactttcttttggttgggtgggtgaggatttcttaggcctgatagaatatatattctgtgaagtttgttaatgtacatattagattgtattggatttttttttcttgaattgcaaatggtattattagataggttatttccagttttacttcatgacaaattacctagagtaaacctacttaatactccaatggattctatgaaagtttaatgggatcagaaattggtgacttataagggggaagatattctaccatatttttataatagcttattattcatgtttcttgtctgaaggacactcaagttacagagcaaaatttctataggttgactagaatgttcataagcatggtcttccagttgcaggaaagatcatgttctatctgtggacacttactgtcctctaccacagctacgtgccagagttgttttccacagttcttataaagggcatgacttaggctctttaccctccaacttaatgtttatacacagggattgtttactaggttaatgacatttaactcccctctcttctgtaggtgagagaaaataagtaagtcttgatctgtttcttaccaaagagagacagacctatgatggaaaatgatcacgtctctgaattttttctttaacgttatagttccttattacagatagtaagcatatgggaatttctgagctataacatgttgagaagttagaaattaaaactaacacaacaaaaggcgctgaatcaaaagatctttgcttttatttggctcagaatgtttttggcttttctgctaaagatggcagaaattactctacacagacctgatttttctttattgcagaccattcttgtgggcttaccctgagacttttatcccaattagtgaatcttggagggaatacttgcttatttatgacttaggtatttccccccaaactttaatattcttgagcacttgaaaatacttttgagaaattttaactgtgattaaatttaggtttattagaaatattctgtacacatttgcctccatggtggtgtaagttctgaaaaattatatgaccgtgacaatagtttatcatcatcattattgttattcaaaataagggtaaataaatctctgtattgccaaagtgacttaaactgttctgatgaccacacagtgtgatttctttagcagagaaagttggttttaaaaataaatagtaccacttttctaagactgtacagtttacaaataaggtttttttctttgttgttttcctcttctattaagttttagtgaaaagcctaattacagaaaattgtgcagatactagtgaagatactagtataagtttaaaggaacatgtgactgtaaaatctcacatttacaaagtgcttgatctcttcatatttcacacgcatgttttagaatagattttagggagtgtttaattcattatccttttgacttaaaatttttgttaccaacttcctaggacttagataatatataaataagtacaaatcccaggggaagtgttgtgatgctagactaaaaggtgggaatgtgctgctgttccgtgagccttgttccattgttgaaaatttgatgcctcagtgtttattcagtaccacctcatggagcttcaatgtaaatggattatatgtataattggtaatttgtatagttttgtagattgtagattaaatgcactcatcatgtc

SEQ ID NO: 813 - DNA, 60 bp, Homo sapiens
ggaacatgtgactgtaaaatctcacatttacaaagtgcttgatctcttcatatttcacac

SEQ ID NO: 814 - DNA, 1908 bp, Homo sapiens
ggccacagtgtgccaatttataattgtagataaagctgaatttactgggcagcaagcttatatgctgatagaagttgatgcactgagaagtgatgagttgaagagaatggaaaaggcagattgagctggaattttaatgcatagtacatttagtagagagacaagctgtcctatatactcctgtatacttcagaaatagctgatagcctatagtctctgagagctattctgtacatagcacagtattataattgatgttcataaataccctgagagattatgttaaaatacattattaatactcccacaaaagcagtaagttaataagtatttccaacaaaaggcagctttgtttcttaaacggataaacaacatataactaggaagatcatcttcaaaataaagtgtcatggaactgaaattagagtatagtctaacaattattttgatacactattgaatagctaacaagtgtctaaagaattttttatttttatagaataggaagtttctaaaagaaaacaattaagagcaaaattggttttgagtatagaaactgaaggatggcagtcttaactcctaagttttttacagagcacagattggtaaactagcatgccacctgttttttgtactatctgtgagctgagactggtttttacattttttaatggtgaaaaaagtcaaaagaaggacattttgtgacacatgaaaacatattaaattaaaatttcagtatccagaaataaagttttattggaacagctgtgcttattgtctttagctgctttcctggtacagtggctgagtttagtagtatagcagagtctgtatggcttccaacagtcaaaatactgcctggccttttaaagagtttgtcaatcccttttatggaggaaggttttgctcatgcatggcatgttagtcaatttagttatttgcttctagctggcagaatgtggtcttgattacttaatttctgttacccctgtgttttccagaatggcttctcctgattttacttacgtgttttactattgctcaaattacagatactaggaaacactactactttataagtacacttctttttcctacttaaactctcaaactacagttacgtatttgccatgatgttaagggaccttgatggtctgtgaattatcagttgctttctgcactacctcctgtagatagacctgactgatagcacttacaaaaagactgatagatgccaaatcagtcatttattaaccctctaatattgttgtcccgatcatttggtaaacgctaagagagcttagttttacattcacaaagtatttgtatttgataagtcttaaaaatgatttaagttgaagcctaacagaggtacttgttcattcctcagttacctgcaaataatggaaataatggtgcagtcagttttatttgattgtgtaatgctttatactaggggtctcaaacccctgggtggcattagattcttacaggagcgtgaaccctattgtgaactgcacatgcaagagatctaggttgtgcgctcattatgagaatctaatacccgatgatctgaggtggaacagtctcatcctgaaaccatctaccccaacacctgtgtctgtggaaattgtctccacgaaaccggtccctgttgaaaaaaggttaggggaccactgctttatacagtgtttgaagtaggcacacttgcagttactatttctggttctttatgactgttgagggggggcagaattctatgtttgattcacagtaaaacttttcatgaatcattgagggttaactgttatcacttgccaatggaaactggatattgaaacatttttttaagaaatgcacttttacctgaaataaaactataaaaactaaaaaaaaaaaaaaaaaaaa

SEQ ID NO: 815 - DNA, 60 bp, Homo sapiens
tgattcacagtaaaacttttcatgaatcattgagggttaactgttatcacttgccaatgg

SEQ ID NO: 816 - DNA, 2163 bp, Homo sapiens
ggcagatgaaatataagattcatcaaccacatttgacagcccatggcaggtttcctgttttccatcgtccctctgcaggtcacagacacacagagcccagccgtggcaggctcagccggggtccggggctgctaacaacggctacattcctcccccagggccaagggaaatcctgagcgcaggccagggttgtttggttttgaggtgtgctgggatgaaaggcaccctggaagtggaaggtaaatgaacaatggaaaaacttcacggcaagattagaaagatacctgagcccaatacccgcctgatgtcgtgggccacacctccgggttaccaggggaagggaggaagcaaactgtcatattgatgtggctctaaacaacaacagtgtgcgaaggcccaggggcactttgggattgaccaagaggaaacacaagttgcacaatgatacaatcttgttggtacaattgtcagagaagggaactcccacagcaaaggccataaaaccatccagggcagtctggggcggctcagttctgcggtgccagggagtggagcagagctcagccccgtcccaaacacagatgggaccatgaactccggacacagcttcagccagaccccctcggcctccttccatggcgccggaggtggctggggccggcccaggagcttccccagggctcccaccgtccatggcggtgcggggggagcccgcatctccctgtccttcaccacgcggagctgcccaccccctggagggtcttggggttctggaagaagcagccccctactaggcggaaatgggaaggccaccatgcagaatctcaacgaccgcctggcctcctacctggagaaggttcgcgccctggaggaggccaacatgaagctggaaagccgcatcctgaaatggcaccagcagagagatcctggcagtaagaaagattattcccagtatgaggaaaacatcacacacctgcaggagcagatagtggatggtaagatgaccaatgctcagattattcttctcattgacaatgccaggatggcagtggatgacttcaacctcaagtatgaaaatgaacactcctttaagaaagacttggaaattgaagtcgagggcctccgaaggaccttagacaacctgaccattgtcacaacagacctagaacaggaggtggaaggaatgaggaaagagctcattctcatgaagaagcaccatgagcaggaaatggagaagcatcatgtgccaagtgacttcaatgtcaatgtgaaggtggatacaggtcccagggaagatctgattaaggtcctggaggatatgagacaagaatatgagcttataataaagaagaagcatcgagacttggacacttggtataaagaacagtctgcagccatgtcccaggaggcagccagtccagccactgtgcagagcagacaaggtgacatccacgaactgaagcgcacattccaggccctggagattgacctgcagacacagtacagcacgaaatctgctttggaaaacatgttatccgagacccagtctcggtactcctgcaagctccaggacatgcaagagatcatctcccactatgaggaggaactgacgcagctacgccatgaactggagcggcagaacaatgaataccaagtgctgctgggcatcaaaacccacctggagaaggaaatcaccacgtaccgacggctcctggagggagagagtgaagggacacgggaagaatcaaagtcgagcatgaaagtgtctgcaactccaaagatcaaggccataacccaggagaccatcaacggaagattagttctttgtcaagtgaatgaaatccaaaagcacgcatgagaccaatgaaagtttccgcctgttgtaaaatctattttcccccaaggaaagtccttgcacagacaccagtgagtgagttctaaaagatacccttggaattatcagactcagaaacttttattttttttttctgtaacagtctcaccagacttctcataatgctcttaatatattgcacttttctaatcaaagtgcgagtttatgagggtaaagctctactttcctactgcagccttcagattctcatcattttgcatctattttgtagccaataaaactccgcactagcaaaaaaaaaaaaaaaa

SEQ ID NO: 817 - DNA, 60 bp, Homo sapiens
acagtctcaccagacttctcataatgctcttaatatattgcacttttctaatcaaagtgc

SEQ ID NO: 818 - DNA, 2397 bp, Homo sapiens
ttttttttttcatcctactttgttttattgggcgttgattgttacaggtcccagcctgtagacatcttttactccaatttcctgaatagatagctttattccttcaaggtaatatagtgcggtggcttctggctgagatgtttgctgttgttttcttcatcttgtctttgatgacttgtcagcctggggtaactgcacaggagaaggtgaaccagagagtaagacgggcagctacacccgcagcagttacctgccagctgagcaactggtcagagtggacagattgctttccgtgccaggacaaaaagtaccgacaccggagcctcttgcagccaaacaagtttgggggaaccatctgcagtggtgacatctgggatcaagccagctgctccagttctacaacttgtgtaaggcaagcacagtgtggacaggatttccagtgtaaggagacaggtcgctgcctgaaacgccaccttgtgtgtaatggagaccaggactgccttgatggctctgatgaggacgactgtgaagatgtcagggccattgacgaagactgcagccagtatgaaccaattccaggatcacagaaggcagccttggggtacaatatcctgacccaggaagatgctcagagtgtgtacgatgccagttattatgggggccagtgtgagacggtatacaatggggaatggagggagcttcgatatgactccacctgtgaacgtctctactatggagatgatgagaaatactttcggaaaccctacaactttctgaagtaccactttgaagccctggcagatactggaatctcctcagagttttatgataatgcaaatgaccttctttccaaagttaaaaaagacaagtctgactcatttggagtgaccatcggcataggcccagccggcagccctttattggtgggtgtaggtgtatcccactcacaagacacttcattcttgaacgaattaaacaagtataatgagaagaaattcattttcacaagaatcttcacaaaggtgcagactgcacattttaagatgaggaaggatgacattatgctggatgaaggaatgctgcagtcattaatggagcttccagatcagtacaattatggcatgtatgccaagttcatcaatgactatggcacccattacatcacatctggatccatgggtggcatttatgaatatatcctggtgattgacaaagcaaaaatggaatcccttggtattaccagcagagatatcacgacatgttttggaggctccttgggcattcaatatgaagacaaaataaatgttggtggaggtttatcaggagaccattgtaaaaaatttggaggtggcaaaactgaaagggccaggaaggccatggctgtggaagacattatttctcgggtgcgaggtggcagttctggctggagcggtggcttggcacagaacaggagcaccattacataccgttcctgggggaggtcattaaagtataatcctgttgttatcgattttgagatgcagcctatccacgaggtgctgcggcacacaagcctggggcctctggaggccaagcgccagaacctgcgccgcgccttggaccagtatctgatggaattcaatgcctgccgatgtgggccttgcttcaacaatggggtgcccatcctcgagggcaccagctgcaggtgccagtgccgcctgggtagcttgggtgctgcctgtgagcaaacacagacagaaggagccaaagcagatgggagctggagttgctggagctcctggtctgtatgcagagcaggcatccaggaaaggagaagagagtgtgacaatccagcacctcagaatggaggggcctcgtgtccagggcggaaagtacagacgcaggcttgctgagggcctctggacacaggctggaccagatgctgtggatgtcgacccctgcactgactattggataaagacttctttcaactaagagaagatgcaaatcagcacacttttttctttgttctgccagcttccaggcctaagactaggttttgctgtctacagccaactattctattagttacaaaactcaatcattttattcagcaactggatgttgactgttaactagaagctctgtcctacttacagcactttggatcatcaaaaaaataaagtaaaatagaaaactgagaaaactcaatccatgaccagggagaacttacaggatgttagagacaaaacaagcagacacctgaaacaatcaacgcccaataaaacaaagtaggatgaaaattctcttagttctttgataacaatttgttcactcatagaaacattattaattggtagggtaagcagacactctgaaacaatgagaaaaatactaaaaattgacttgagttatttc

SEQ ID NO: 819 - DNA, 60 bp, Homo sapiens
tggatgttgactgttaactagaagctctgtcctacttacagcactttggatcatcaaaaa

SEQ ID NO: 820 - DNA, 1157 bp, Homo sapiens
gggggacggtggggaagatggcgtaccagagcttgcggctggagtacctgcagatcccaccggtcagccgcgcctacaccactgcctgcgtcctcaccaccgccgccgtgcagttggaattgatcacaccttttcagttgtacttcaatcctgaattaatctttaaacactttcaaatatggagattaatcaccaacttcttattttttgggccagttggattcaattttttatttaacatgatttttctatatcgttactgtcgaatgctagaagaaggctctttccgaggtcggacagcagactttgtatttatgttcctttttggtggattcttaatgaccctttttggtctgtttgtgagcttagttttcttgggccaggcctttacaataatgctcgtctatgtgtggagccgaaggaacccctatgtccgcatgaacttcttcggccttctcaacttccaggccccctttctgccctgggtgctcatgggattttccttgttgttggggaactcaatcattgtggaccttttgggtattgcagttggacacatatattttttcttggaagatgtatttcccaatcaacctggtggaataagaattctgaaaacaccatctattttgaaagctatttttgatacaccagatgaggatccaaattacaatccactacctgaggaacggccaggaggcttcgcctggggtgagggccagcggcttggaggttaaagcagcagtgccaataatgagacccagctgggaaggactcggtgatacccactgggatcttttatcctttgttgcaaaagtgtggacacttttgacagcttggcagattttaactccagaagcactttatgaaatggtacactgactaatccagaagacatttccaacagtttgccagtggttcctcactacactggtactgaaagtgtaatttcttagagccaaaaaactggagaaacaaatatcctgccacctctaacaagtacatgagtacttgatttttatggtataaggcagagccttttcttcctcttcttgatagatgaggccatggtgtaaatggaagtttcagagaggacaaaataaaacggaattccatttttctctcactaaaaaaaaaaaaaaaaaaaaaaaaaaaaa

SEQ ID NO: 821 - DNA, 60 bp, Homo sapiens
tattgtctgtctctgaatccctataaagcttcaagtctgtatgacattcttaacgccaaa

SEQ ID NO: 822 - DNA, 2013 bp, Homo sapiens
ctccgctgcgtgtaggtgaagggggcttcctgaccgagacatggatttaggtgctattacaaaatactcagcattacacgccaagcccaatggactgatccttcaatacgggactgctggatttcgaacgaaggcagaacatcttgatcatgtcatgtttcgcatgggattattagctgtcctgaggtcaaaacagacaaaatccactataggagtcatggtaacagcgtcccacaatcctgaggaagacaatggtgtaaaattggttgatcctttgggtgaaatgttggcaccatcctgggaggaacatgccacctgtttagcaaatgctgaggaacaagatatgcagagagtgcttattgacatcagcgagaaagaagctgtgaatctgcaacaagatgcctttgtagttattggtagagataccaggcccagcagtgagaaactttcacaatctgtaatagatggtgtgactgttctaggaggtcaattccatgattatggcttgttaacaacaccccagctgcactacatggtgtattgtcgaaacacgggtggccgatatggaaaggcaactatagaaggttactaccagaaactctctaaggcttttgtggaactcaccaaacaggcttcttgcagtggagatgaatacagatcacttaaggttgactgtgcaaatggcataggggccctgaagctaagggaaatggaacactacttctcacagggcctgtcagttcagctgtttaatgatgggtccaagggcaaactcaatcatttatgtggagctgactttgtgaaaagtcatcagaaacctccacagggaatggaaattaagtccaatgaaagatgctgttcttttgatggagatgcagacagaattgtttattactaccatgatgcagatggccactttcatctcatagatggagacaagatagcaacgttaattagcagtttccttaaagagctcctggtggagattggagaaagtttgaatattggtgttgtacaaactgcatatgcaaatggaagttcaacacggtatcttgaagaagttatgaaggtacctgtctattgcactaagactggtgtaaaacatttgcaccacaaggctcaagagtttgacattggagtttattttgaagcaaatgggcatggcactgcactgtttagtacagctgttgaaatgaagataaaacaatcagcagaacaactggaagataagaaaagaaaagctgctaagatgcttgaaaacattattgacttgtttaaccaggcagctggtgatgctatttctgacatgctggtgattgaagcaatcttggctctgaagggcttgactgtacaacagtgggatgctctctatacagatcttccaaacagacaacttaaagttcaggttgcagacaggagagttattagcactaccgatgctgaaagacaagcagttacacccccaggattacaggaggcaatcaatgacctggtgaagaagtacaagctttctcgagcttttgtccggccctctggtacagaagatgtcgtccgagtatatgcagaagcagactcacaagaaagtgcagatcaccttgcacatgaagtgagcttggcagtatttcagctggctggaggaattggagaaaggccccaaccaggtttctgaagataattttcatattcctgagaaactggactttttacaagtctttacaaaactgtcaataataatggcagtactaagagatttataatcataatgtttacaatgcagcctactggattgtctctagatctgtttttcttaaacactaacagaataattctttataaataggtaagccttacacttgttaaagaaatttacctctaatttcagtctcactaatgtaaaatactgggacttaagtatacaattcagtcactaactgtacagttttatgtggggaacaattcatgcaggctactggaaaattaaatcttattaccaaaaaaaaaaaaaaaaaaaaa

SEQ ID NO: 823 - DNA, 60 bp, Homo sapiens
aatgaatatccttgtaccctctatatagctaacttccaaatgtaagagaactatggggta

SEQ ID NO: 824 - DNA, 1667 bp, Homo sapiens; identical to SEQ ID NO: 715

SEQ ID NO: 825 - DNA, 60 bp, Homo sapiens
ggcctttttctcgtccttattaaacccttagtatacaaggataaataaattctcacctgc

SEQ ID NO: 826 - DNA, 1314 bp, Homo sapiens
atggcatccgttgcagttgatccacaaccgagtgtggtgactcgggtggtcaacctgcccttggtgagctccacgtatgacctcatgtcctcagcctatctcagtacaaaggaccagtatccctacctgaagtctgtgtgtgagatggcagagaacggtgtgaagaccatcacctccgtggccatgaccagtgctctgcccatcatccagaagctagagccgcaaattgcagttgccaatacctatgcctgtaaggggctagacaggattgaggagagactgcctattctgaatcagccatcaactcagattgttgccaatgccaaaggcgctgtgactggggcaaaagatgctgtgacgactactgtgactggggccaaggattctgtggccagcacgatcacaggggtgatggacaagaccaaaggggcagtgactggcagtgtggagaagaccaagtctgtggtcagtggcagcattaacacagtcttggggagtcggatgatgcagctcgtgagcagtggcgtagaaaatgcactcaccaaatcagagctgttggtagaacagtacctccctctcactgaggaagaactagaaaaagaagcaaaaaaagttgaaggatttgatctggttcagaagccaagttattatgttagactgggatccctgtctaccaagcttcactcccgtgcctaccagcaggctctcagcagggttaaagaagctaagcaaaaaagccaacagaccatttctcagctccattctactgttcacctgattgaatttgccaggaagaatgtgtatagtgccaatcagaaaattcaggatgctcaggataagctctacctctcatgggtagagtggaaaaggagcattggatatgatgatactgatgagtcccactgtgctgagcaatttgagtcacgtactcttgcaattgcccgcaacctgactcagcagctccagaccacgtgccacaccctcctgtccaacatccaaggtgtaccacagaacatccaagatcaagccaagcacatgggggtgatggcaggcgacatctactcagtgttccgcaatgctgcctcctttaaagaagtgtctgacagcctcctcacttctagcaaggggcagctgcagaaaatgaaggaatctttagatgacgtgatggattatcttgttaacaacacgcccctcaactggctggtaggtcccttttatcctcagctgactgagtctcagaatgctcaggaccaaggtgcagagatggacaagagcagccaggagacccagcgatctgagcataaaactcattaa

SEQ ID NO: 827 - DNA, 60 bp, Homo sapiens
gctgcagaaaatgaaggaatctttagatgacgtgatggattatcttgttaacaacacgcc

SEQ ID NO: 828 - DNA, 2808 bp, Homo sapiens
agcgggcggcccggcggctgcgtactggctgtgggatgggaagtgaagccccagcgagcggctgcagcggggccgtgaggagcagccagcgggaggcggcggcgagtcggtgagcagctgggaagagcagaaccggggcggagcacctgcaggcgcgggcggcggccccaccatggcgattcgcaagaaaagcaccaagagccccccagtgctgagccacgaattcgtcctgcagaatcacgcggacatcgtctcctgtgtggcgatggtcttcctgctggggctcatgtttgagataacggcaaaagcttctatcatttttgttactcttcagtacaatgtcaccctcccagcaacagaagaacaagctactgaatcagtgtccctttattactatggcatcaaagatttggctactgttttcttctacatgctagtggcgataattattcatgccgtaattcaagagtatatgttggataaaattaacaggcgaatgcacttctccaaaacaaaacacagcaagtttaatgaatctggtcagcttagtgcgttctacctttttgcctgtgtttggggcacattcattctcatctctgaaaactacatctcagacccaactatcttatggagggcttatccccataacctgatgacatttcaaatgaagtttttctacatatcacagctggcttactggcttcatgcttttcctgaactctacttccagaaaaccaaaaaagaagatattcctcgtcagcttgtctacattggtctttacctcttccacattgctggagcttaccttttgaacttgaatcatctaggacttgttcttctggtgctacattattttgttgaatttcttttccacatttcccgcctgttttattttagcaatgaaaagtatcagaaaggattttctctgtgggcagttctttttgttttgggaagacttctgactttaattctttcagtactgactgttggttttggccttgcaagagcagaaaatcagaagctggatttcagtactggaaacttcaatgtgttagctgttagaatcgctgttctggcatccatttgcgttactcaggcatttatgatgtggaagttcattaattttcagcttcgaaggtggagggaacattctgcttttcaggcaccagctgtgaagaagaaaccaacagtaactaaaggcagatcttctaaaaaaggaacagaaaatggtgtgaatggaacattaacttcaaatgtagcagactctccccggaataaaaaagagaaatcttcataatgaattataaactaattgattaatgtccccaaagaaatctgctttctactatatctttcagcattagagatttttctgttcttgaaaatacagtctgtgctctttgatttttgctattgtacggtttcatgcatttttttaaagggcatttgaggggaggattattgctatgaatgaaaaaaatattttagcttagactaagctacctgccttcaaaatagtttagggaccaccaccatattttattttgtttttatttttgaacatttttctaatgatttggagagaaaactatttacaaaaattccacatatcagtgatacaatttcttgctgtcaccaattttttataatagcagagtggcctgttctaagaaggccatattttttaagttatctttcagggtaacatggaaatactataaagttggatgtcaaactttaatatgttttcagtgttctctaattttttggaatttttgtagactttacacctggaaaaaaagatttgtaaaatcaccggaacaattgtgtgctttattttataggtagtggttattagtattacatccccattttaaaaacaaaaacataataatggttacaacacgtggagttttactaacatacatattaaatcaaagtatattcttaaaagtacttgtgaagtaaaatctttcttgtgcattttcaatacttgtaaactggaaatcagaaaatatttactatgaacaggaaaatctgacatatagccctttttgatatgtttattaataatgattcttaatggggctcataataagtttaatatgcacagcatcttagaaaagtttaacctgcaaacacttttaaaacataatgcctacttgatttatatctataaaaagactgacaggtaattatatttggaaaacatttaatgcactaactttaaagaaattgaaaattcaggtggataaatagtcttacaaaagacaatgtgctttatgttatacctatagctttggtcccatctttaattgagaaacatttatctgtataaaacatatttttggataaatatatatatatatatttgtatcgctacagaaaggctctaaaaagcatttgaggaaaatatttggttcccttttctataatcatcctttaagattcttatagctacatttggtttattcatcatatttacagtatatatattgttcttttcagtgttcacatcttgttccccatttctcacttgtgtcaccagctgtttgtgccatttttagtgtaaaagttgcagacctattagatctgcagtttaagttgccatgctgctaggaaattgtcctttttctttctagctgttaacctacttcctggaaaaagtagtagctctctgtagcattatggagtttcagtggaaccaaatttttgccattaaaaactggcattatactgaactatacattgagaaatcaatcaaaataaaaatttttactttcacaagttgcaaaaaaaaaaaaaaaa

SEQ ID NO: 829 - DNA, 60 bp, Homo sapiens
agaaaatcagaaactggatttcagtactggaaacttcaatgtgttagctgttagaatcgc

SEQ ID NO: 830 - DNA, 2400 bp, Homo sapiens
ctgtaggggaggatattttgattgaacacaggcttgacagaatcttcttttcttcttagaaatcctagaaaacagaaagcaacaggaagatgtcttattgggaactacccccatcaacttcaccatgagtcaaacaaggaagaaaacttcctcagaaggagaaactaagccccagacttcaactgtcaacaaatttctcaggggctccaatgctgaaagcagaaaagaggacaatgaccttaaaacaagtgattcccaacccagcgactggatacagaagacagccacctcagagactgctaagcctctcagttcagaaatggaatggagatccagtatggagaaaaatgagcatttcctgcagaagctgggcaaaaaggctgtcaacaagtgtctagatttgaataactgtggattaacaacagcggacatgaaagaaatgggagaagcatttgagatgattcctgaacttgaagagctaaatttgtcttggaacagtaaagtgggaggaaatttgcctctgatccttcagaagttccaaaaagggagcaagatacaaatgattgagcttgtggattgctccctcacgtcagaagatgggacatttctgggtcaactgctacctatgctgcaaagtctcgaagtacttgatctttccattaacagagacattgttggcagtctgaacagtattgctcagggattaaaaagcacctcaaatctgaaagtactgaagttacattcatgtggattatcacaaaagagtgtcaaaatattggatgctgcttttaggtatttgggtgagctgaggaaattagatctttcctgcaataaggatctaggtggaggttttgaagactcgccggctcagttggtcatgctaaagcatctacaagtcctagatcttcaccagtgctcactaacagcagatgacgtgatgtcactgacccaggtcattcctttactttcaaatcttcaagaattggatttatcagccaacaaaaagatgggcagttcttctgaaaacttactcagcaggctccgatttttaccagcattgaagtcattagttatcaacaactgtgctttggagagtgagacttttacagctcttgctgaagcctctgttcacctctctgctctggaagtattcaacctttcttggaacaagtgtgttggtggcaacttggagctgcttctggaaacactaaagctttccatgtctcttcaagtgctgaggctgagcagctgttccctggtgacagaggatgtggctctcctggcatcggtcatacagacgggtcatctggccaaactgcaaaagctggacctgagctacaatgacagcatctgtgatgcagggtggaccatgttctgccaaaacgtgcggttcctcaaagagctaatcgagctggatattagccttcgaccatcaaattttcgagattgtggacaatggtttagacacttgttatatgctgtgaccaagcttcctcagatcactgagataggaatgaaaagatggattctcccagcttcacaggaggaagaactagaatgctttgaccaagaaaaaaaaaagaagcattcactttgaccatggtgggtttcagtaaactgatttcccatgtcctactaagctacaaaccattctccaaaggaaaagaacatgaacgaattccagagtcatgaactgaatttcaacttctgggccatttaatgggacttatattacaagagctttgtaaatatatatatatattacatatatatatgtaatatacatatatacacatatatataatatacatatataatacacatatatatgtaaatatatatataatatctaatatgagcatgccattattctctgtctatgaaacaaaaatggcatttttcaatggatttgttttggatatataattagttcatttgctgtttagaagccttgccaaaagtgtttagattttggtactgcaactgctttcctcttgcccagaaatgttttgcctcttcttttcctacaagttaaatgttctaaatataaaggggtatgtgtgtgtgtgtgtaattctaatgtgaaaggcactagctgtctaatagtttcatgtatcattactattactatatgtatcttaatgtagtctatgtaggtttttatcagaaagtgtacctttctatggtttattattttatattctggtgccttttatctcagatataaaccatgaacagtaatgatagtcactgacatataaatcttagtaaaaagtgattaaaaatctaaaactcagtatgaaaaacatatcttgttagaataaattaaaaccttttattgtttaaaaaattgttaaaaaaaaaaaaaaaaaaaaaaaaaaaaaaaaaaaaaaaaaaaaa

SEQ ID NO: 831 - DNA, 60 bp, Homo sapiens
tactttcccaatgcttagtagcacttgagactttatttccatcgacaaaaaccaagaagg

SEQ ID NO: 832 - DNA, 2694 bp, Homo sapiens
ccctaggacacctttctaaaaagactccctgtggtgttcagaatcactcctacagtcaggttctccacaatggatctcagtgctgcaagtcaccgcatacctctaagtgatggaaacagcattcccatcatcggacttggtacctactcagaacctaaatcgacccctaagggagcctgtgcaacatcggtgaaggttgctattgacacagggtaccgacatattgatggggcctacatctaccaaaatgaacacgaagttggggaggccatcagggagaagatagcagaaggaaaggtgcggagggaagatatcttctactgtggaaagctatgggctacaaatcatgtcccagagatggtccgcccaaccctggagaggacactcagggtcctccagctagattatgtggatctttacatcattgaagtacccatggcctttaagccaggagatgaaatataccctagagatgagaatggcaaatggttatatcacaagtcaaatctgtgtgccacttgggaggcgatggaagcttgcaaagacgctggcttggtgaaatccctgggagtgtccaattttaaccgcaggcagctggagctcatcctgaacaagccaggactcaaacacaagccagtcagcaaccaggttgagtgccatccgtatttcacccagccaaaactcttgaaattttgccaacaacatgacattgtcattactgcatatagccctttggggaccagtaggaatccaatctgggtgaatgtttcttctccacctttgttaaaggatgcacttctaaactcattggggaaaaggtacaataagacagcagctcaaattgttttgcgtttcaacatccagcgaggggtggttgtcattcctaaaagctttaatcttgaaaggatcaaagaaaattttcagatctttgacttttctctcactgaagaagaaatgaaggacattgaagccttgaataaaaatgtccgctttgtagaattgctcatgtggcgcgatcatcctgaatacccatttcatgatgaatactgactgccgggagttcctgaacagatttttcactcccatgagtgccaagacggtgcaatgggtagtcccctagatgtgaaaatgaagagagagggttttaccatcctgagaagaaataatgatggaaacatgtttaatgtttgtgcagtgtaaatgactttgactcagtcacattgaagtaaaaatattaaaatctgttgaaataactcttaggaaattatcaactaattttttcagatcagtatcttctagattccagacagaaaaaaattacacttcagaaaagacatcaaaggcaacatatgacaacaagtaatttatgaatctgggtagtagcgttggtaatctgagttctttaagggttcacaggacaacgaagtgcatgtggcagtgtgctggcagtggccttgaggctttggaccattggttacaaaacagacacagccaagataagatccacacacacattattaacaaggaagtgatttgctgcaccttgagttgagaggactacatgtagaaaagtcttaaaatagagctaaacaccacagtggtcaacaaagccatcataatgttggtgtttgtttccctccaatgtatgtatgtttagtttttatccaacctgaggaatgaaaacttaactggatctctcttgcatccttaaagggcctgagtctcaacatggctgctgatccatacttacacatcttactgtcaatcttgcctacattgattatagaaccactattacgtgaaaaggcttgaaacaaccaacatatacaaataaaaccctgccttgtaaaatagtaaaagagaagccatatattggcttttcttcttaacttgggagatatattgaaacaaggtgctttataagattattgtacttaagactttaatagtgttacttggatagcttatatgaattttgagaattttatatgaattttgagaaagcaagttcaaaagaactctggtaattttcctgtatgtacaatttaaagagtgaataagattattagaattcagcaatagagatatatctattttcaattcaactacagaaatatattttattggccgggtgcggtggctcatgcctataatcccagcactttgggaggccaaggtgggcagatcaggaggtcaggagatcgagaccatcttggctaacaaggtgaaaccccgtctctactaaaaatacaaaaaattagccaggcgcggtggcgggggcctgtaatcccagctactcaggaggctgaggcagaagaatggcatgaacccgggaggaggagcttgcagtgagccgagatagcgccactgcagtccggcctgggtgaaagagcgagactccgtctcaaaaacaaaaaaaaaaaagaaaagaaatatattttattcattcacattaggtcactgtcatactgtcataggctgagagagttcttcaaaaattatgttttcccaagatcagttgcttatagataatgttcaatgacctcaagacatatatttttgagaaattatcattttaaaaaatttggtctatactgattgttttcactgattccaatattattacttataacactgacctctggaaaatattttgttcacaagaaataataaagtataatgatttgttgcatc

SEQ ID NO: 833 - DNA, 60 bp, Homo sapiens
ctgtcataggctgagagagttcttcaaaaattatgttttcccaagatcagttgcttatag

SEQ ID NO: 834 - DNA, 20 bp, Artificial Sequence
  oligonucleotide primer
cgcagtttgtcgtgtttcca

SEQ ID NO: 835 - DNA, 26 bp, Artificial Sequence
  oligonucleotide primer
aagcgagaggagatttctattctgaa

SEQ ID NO: 836 - DNA, 22 bp, Artificial Sequence
  oligonucleotide probe
accagttgtgccgtccactcac

SEQ ID NO: 837 - DNA, 22 bp, Artificial Sequence
  oligonucleotide primer
tcctcatcaagttgttgctgga

SEQ ID NO: 838 - DNA, 21 bp, Artificial Sequence
  oligonucleotide primer
gctgtggatgtggctgaaagt

SEQ ID NO: 839 - DNA, 25 bp, Artificial Sequence
  oligonucleotide probe
tcctgtcaggcattgctgttgcaga

SEQ ID NO: 840 - DNA, 20 bp, Artificial Sequence
  oligonucleotide primer
ccggcttctttggctatgac

SEQ ID NO: 841 - DNA, 21 bp, Artificial Sequence
  oligonucleotide primer
actcaagccgaactcctggtt

SEQ ID NO: 842 - DNA, 24 bp, Artificial Sequence
  oligonucleotide probe
ctgactgtccagagcatccaggtc

SEQ ID NO: 843 - DNA, 21 bp, Artificial Sequence
  oligonucleotide primer
tgttcctgcttttccccaagt

SEQ ID NO: 844 - DNA, 24 bp, Artificial Sequence
  oligonucleotide primer
aagggagtaatctgcgatgtgaat

SEQ ID NO: 845 - DNA, 27 bp, Artificial Sequence
  oligonucleotide probe
caaccacacccacactcagatcctcct

SEQ ID NO: 846 - DNA, 21 bp, Artificial Sequence
  oligonucleotide primer
cccagtggagttgggatttct

SEQ ID NO: 847 - DNA, 21 bp, Artificial Sequence
  oligonucleotide primer
gcctttccccatgcatataca

SEQ ID NO: 848 - DNA, 24 bp, Artificial Sequence
  oligonucleotide probe
cctctttctgtttggatggtgtat

SEQ ID NO: 849 - DNA, 26 bp, Artificial Sequence
  oligonucleotide primer
cacctttactagtcctttggagacaa

SEQ ID NO: 850 - DNA, 20 bp, Artificial Sequence
  oligonucleotide primer
caccagtgtgggcagagtgt

SEQ ID NO: 851 - DNA, 24 bp, Artificial Sequence
  oligonucleotide probe
ttacctgtattaggagcccaggcc

SEQ ID NO: 852 - DNA, 23 bp, Artificial Sequence
  oligonucleotide primer
caccacattcttcattgattgca

SEQ ID NO: 853 - DNA, 20 bp, Artificial Sequence
  oligonucleotide primer
gcggccttggagactttctt

SEQ ID NO: 854 - DNA, 21 bp, Artificial Sequence
  oligonucleotide probe
ccgccctcggtctggcctatg

SEQ ID NO: 855 - DNA, 23 bp, Artificial Sequence
  oligonucleotide primer
ggtcaccgagtgaagtcgataaa

SEQ ID NO: 856 - DNA, 23 bp, Artificial Sequence
  oligonucleotide primer
gaagtgctgcctgacgtaatctt

SEQ ID NO: 857 - DNA, 24 bp, Artificial Sequence
  oligonucleotide probe
aacccagacatgcgagtgcagatc

SEQ ID NO: 858 - DNA, 20 bp, Artificial Sequence
  oligonucleotide primer
tcttccgatgggtggtgtct

SEQ ID NO: 859 - DNA, 20 bp, Artificial Sequence
  oligonucleotide primer
tctgcacaccagcgacaact

SEQ ID NO: 860 - DNA, 24 bp, Artificial Sequence
  oligonucleotide probe
tgacttggacctcagatcattgga

SEQ ID NO: 861 - DNA, 21 bp, Artificial Sequence
  oligonucleotide primer
gctgcctctgctctcctcagt

SEQ ID NO: 862 - DNA, 22 bp, Artificial Sequence
  oligonucleotide primer
gtaagtggaaggagccgaaaga

SEQ ID NO: 863 - DNA, 22 bp, Artificial Sequence
  oligonucleotide probe
cctccctgtcggccttcccctt

What is claimed is:

1. A method of identifying an agent that modifies HSD1 activity comprising
a) measuring expression levels of one or more genes in a test sample from a HepG2 hepatoma cell line contacted with an agent and cortisone, wherein said HepG2 hepatoma cell line expresses HSD1 at a level that is detectably higher than the level of HSD1 in unmodified HepG2 hepatoma cells, and each of said one or more genes corresponds to a marker listed in Table 2; and
b) comparing said measured gene expression levels of said one or more genes in said test sample to gene expression levels of said one or more genes measured in a control sample, wherein said control sample is obtained from said HepG2 hepatoma cell line that expresses HSD1, is contacted with cortisone, and is not contacted with said test agent,
wherein a difference in said expression levels of said one or more genes in said test sample as compared to said control sample indicates that said test agent modifies HSD1 activity.

2. The method of claim 1 wherein said plurality of genes comprises three or more protein sequences of markers listed in Table 2.

3. The method of claim 1 wherein said measuring of expression level of one or more genes is determined using a method selected from the group consisting of a microarray, RT-PCR, Northern blot, and detecting protein level.

4. The method of claim 1 wherein said one or more genes comprises three or more nucleotide sequences selected from Table 2.

5. The method of claim 1 wherein said one or more genes comprises five or more genes selected from Table 2.

6. The method of claim 1 wherein said one or more genes comprises ten or more genes selected from Table 2.

7. A method of estimating HSD1 off-target activity of an agent comprising:
a) contacting an agent that modifies HSD1 activity with a first sample of HepG2 hepatoma cell line cells, wherein said cell line over-expresses HSD1;
b) measuring an expression level of one or more genes in said first sample, wherein said one or more genes are indicative of HSD1 off-target activity;
c) comparing each said measured expression level to a second expression level of each of said one or more genes in a second sample of cells from said HepG2 hepatoma cell line not contacted with said agent;
wherein a change in expression level of said one or more genes between said first sample and said second sample provides an estimate of HSD1 off-target activity.

8. The method of claim 7 wherein said measuring an expression level is determined using a method selected from the group consisting of a microarray, RT-PCR, Northern blot, and detecting protein level.

9. The method of claim 7 wherein said one or more genes comprise SCD1, DHCR7, ACLY, FBXO9 or HEY1.

10. The method of claim 7 wherein said expression level is measured for a plurality of genes indicative of HSD1 off-target activity.

11. The method of claim 10 wherein said plurality of genes comprises five or more genes, each gene in said five or more genes corresponding to a sequence selected from Table 6

12. The method of claim 11 wherein said five or more genes comprise SCD1, DHCR7, ACLY, FBXO9 and HEY1.

13. The method of claim 7 wherein said measuring an expression level is determined by measuring the transcript level of said one or more genes.

14. The method of claim 7 wherein said one or more genes comprises SCD1.

15. The method of claim 7, wherein HSD1 is expressed in said HepG2 hepatoma cell line at least two-fold higher than expression of HSD1 in a HepG2 hepatoma cell line that does not over-express HSD1.

16. The method of claim 7, wherein HSD1 is expressed in said HepG2 hepatoma cell line at least five-fold higher than expression of HSD1 in a HepG2 hepatoma cell line that does not over-express HSD1.

17. The method of claim 7, wherein HSD1 is expressed in said HepG2 cell line at least ten-fold higher than expression of HSD1 in a HepG2 hepatoma cell line that does not over-express HSD1.

18. The method of claim 7, wherein steps a) and b) are repeated using a second agent and wherein said first and second agents are rank ordered based on the magnitude of change in expression level of said one or more genes between said first samples contacted with said first and second agents compared to said second cell sample not contacted with said agents.

19. The method of claim 7, wherein steps a) and b) are performed for each of a plurality of additional agents and wherein said agents are rank ordered based on the magnitude of change in expression level of said one or more genes between said first samples contacted with said plurality of agents compared to said second cell sample not contacted with said plurality of agents, and wherein the agent exhibiting the largest change in gene expression between said first sample and second sample compared to the other agents within said plurality of agents is identified at having the highest level of off-target HSD1 activity.

20. A method of sorting HSD1-agents comprising:
a) contacting a subject with an HSD1-agent and cortisone, wherein said subject has detectable HSD1 activity;
b) measuring expression levels of a plurality of genes in a test sample obtained from said subject after contact with said HSD1-agent and cortisone, wherein each of said plurality of genes corresponds to the markers listed in Table 2, and
c) comparing said measured gene expression levels in said test sample to gene expression levels for said plurality of genes measured in a control sample to obtain a gene expression difference result,
wherein said control sample is obtained from said subject and contacted with cortisone and not contacted with said HSD1-agent,
wherein said HSD1-agent is sorted by the magnitude of said gene expression difference result.
